(19) United States
(12) Patent Application Publication
(10) Pub. No.: US 2005/0125852 A1
(43) Pub. Date: Jun. 9, 2005

(54) Novel kinases

(75) Inventors: Sean Caenepeel, Woodland Hills, CA (US); Gerard Manning, La Jolla, CA (US); Glen Charydczak, Princeton Jct, NJ (US); Igor Grigoriev, Walnut Creek, CA (US)

Correspondence Address: FOLEY AND LARDNER;SUITE 500, 3000 K STREET NW, WASHINGTON, DC, 20007, US

(73) Assignee: Sugen, Inc.

(21) Appl. No.: 10/840,512

(22) Filed: May 7, 2004

Related U.S. Application Data
(60) Provisional application No. 60/469,014, filed on May 9, 2003.

(51) Int. Cl. C12Q 1/68; A01K 67/027; C07H 21/04; C12N 9/12

(52) U.S. Cl. 800/18; 435/6; 435/69.1; 435/194; 435/320.1; 435/325; 536/23.2

(57) ABSTRACT

The present invention relates to kinase polypeptides, nucleotide sequences encoding the kinase polypeptides, as well as various products and methods useful for the diagnosis and treatment of various kinase-related diseases and conditions. Through the use of a bioinformatics strategy, mammalian members of protein and lipid kinase families have been identified and their protein structure predicted.

### FIELD OF THE INVENTION

[0001] This regular U.S. application claims priority to U.S. provisional application Ser. No. 60/469,014, filed May 9, 2003, which is incorporated herein by reference. The present invention relates to kinase polypeptides, nucleotide sequences encoding the kinase polypeptides, as well as various products and methods useful for the diagnosis and treatment of various kinase-related diseases and conditions.

### BACKGROUND OF THE INVENTION

[0002] The following description of the background of the invention is provided to aid in understanding the invention, but is not admitted to be or to describe prior art to the invention.

[0003] Cellular signal transduction is a fundamental mechanism whereby external stimuli that regulate diverse cellular processes are relayed to the interior of cells. One of the key biochemical mechanisms of signal transduction involves the reversible phosphorylation of proteins, which enables regulation of the activity of mature proteins by altering their structure and function.

[0004] Protein phosphorylation plays a pivotal role in cellular signal transduction. Among the biological functions controlled by this type of postranslational modification are: cell division, differentiation and death (apoptosis); cell motility and cytoskeletal structure; control of DNA replication, transcription, splicing and translation; protein translocation events from the endoplasmic reticulum and Golgi apparatus to the membrane and extracellular space; protein nuclear import and export; regulation of metabolic reactions, etc. Abnormal protein phosphorylation is widely recognized to be causally linked to the etiology of many diseases including cancer as well as immunologic, neuronal and metabolic disorders.

[0005] The following abbreviations are used for kinases throught this application:
[0006] ASK Apoptosis signal-regulating kinase
[0007] CaMK Ca²⁺/calmodulin-dependent protein kinase
[0008] CCRK Cell cycle-related kinase
[0009] CDK Cyclin-dependent kinase
[0010] CK Casein kinase
[0011] DAGK Di-acyl glycerol kinase
[0012] DAPK Death-associated protein kinase
[0013] DM myotonic dystrophy kinase
[0014] Dyrk dual-specificity-tyrosine phosphorylating-regulated kinase
[0015] GAK Cyclin G-associated kinase
[0016] GRK G-protein coupled receptor
[0017] GuC Guanylate cyclase
[0018] HIPK Homeodomain-interacting protein kinase
[0019] IRAK Interleukin-1 receptor-associated kinase
[0020] MAPK Mitogen activated protein kinase
[0021] MAST Microtubule-associated STK
[0022] MLCK Myosin-light chain kinase
[0023] MLK Mixed lineage kinase
[0024] NEK NimA-related protein kinase (═NEK)
[0025] PKA cAMP-dependent protein kinase
[0026] RSK Ribosomal protein S6 kinase
[0027] RTK Receptor tyrosine kinase
[0028] SGK Serum and glucocorticoid-regulated kinase
[0029] STK serine threonine kinase
[0030] ULK UNC-51-like kinase

[0031] Protein kinases in eukaryotes phosphorylate proteins on the hydroxyl substituent of serine, threonine and tyrosine residues, which are the most common phospho-acceptor amino acid residues. However, phosphorylation on histidine has also been observed in bacteria.

[0032] The presence of a phosphate moiety modulates protein function in multiple ways. A common mechanism includes changes in the catalytic properties (Vmax and Km) of an enzyme, leading to its activation or inactivation.

[0033] A second widely recognized mechanism involves promoting protein-protein interactions. An example of this is the tyrosine autophosphorylation of the ligand-activated EGF receptor tyrosine kinase. This event triggers the high-affinity binding to the phosphotyrosine residue on the receptor's C-terminal intracellular domain of the SH2 motif of the adaptor molecule Grb2. Grb2, in turn, binds through its SH3 motif to a second adaptor molecule, such as SHC. The formation of this ternary complex activates the signaling events that are responsible for the biological effects of EGF. Serine and threonine phosphorylation events also have been recently recognized to exert their biological function through protein-protein interaction events that are mediated by the high-affinity binding of phosphoserine and phosphothreonine to WW motifs present in a large variety of proteins (Lu, P. J. et al (1999) Science 283:1325-1328).

[0034] A third important outcome of protein phosphorylation is changes in the subcellular localization of the substrate. As an example, nuclear import and export events in a large diversity of proteins are regulated by protein phosphorylation (Drier E. A. et al (1999) Genes Dev 13: 556-568).

[0035] Protein kinases are one of the largest families of eukaryotic proteins with several hundred known members. These proteins share a 250-300 amino acid domain that can be subdivided into 12 distinct subdomains that comprise the common catalytic core structure. These conserved protein motifs have recently been exploited using PCR-based and bioinformatic strategies leading to a significant expansion of the known kinases.

[0036] Kinases largely fall into two groups: those specific for phosphorylating serines and threonines, and those specific for phosphorylating tyrosines. Some kinases, referred to as “dual specificity” kinases, are able to phosphorylate tyrosine as well as serine/threonine residues.

[0037] Protein kinases can also be characterized by their location within the cell. Some kinases are transmembrane receptor-type proteins capable of directly altering their catalytic activity in response to the external environment such as the binding of a ligand. Others are non-receptor-type proteins lacking any transmembrane domain. They can be found in a variety of cellular compartments from the inner surface of the cell membrane to the nucleus.

[0038] Many kinases are involved in regulatory cascades wherein their substrates may include other kinases whose activities are regulated by their phosphorylation state. Ultimately the activity of some downstream effector is modulated by phosphorylation resulting from activation of such a pathway. The conserved protein motifs of these kinases have recently been exploited using PCR-based cloning strategies leading to a significant expansion of the known kinases.

[0039] Multiple alignment of the sequences in the catalytic domain of protein kinases and subsequent parsimony analysis permits the segregation of related kinases into distinct branches of subfamilies including: tyrosine kinases (PTKs), dual-specificity kinases, and serine/threonine kinases (STKs). The latter subfamily includes cyclic-nucleotide-dependent kinases, calcium/calmodulin kinases, cyclin-dependent kinases (CDKs), MAP-kinases, serine-threonine kinase receptors, and several other less defined subfamilies.

[0040] The protein kinases may be classified into several major groups including AGC, CAMK, Casein kinase 1, CMGC, STE, tyrosine kinases, and atypical kinases (Plowman, G D et al., Proceedings of the National Academy of Sciences, USA, Vol. 96, Issue 24, 13603-13610, Nov. 23, 1999; see also www.kinase.com). Within each group are several distinct families of more closely related kinases. In addition, there is a group designated “other” to represent several smaller families. In addition, an “atypical” family represents those protein kinases whose catalytic domain has little or no primary sequence homology to conventional kinases, including the alpha kinases, pyruvate dehydrogenase kinases, A6 kinases and PI3 kinases.

[0041] AGC Group

[0042] The AGC kinases are basic amino acid-directed enzymes that phosphorylate residues found proximal to Arg and Lys. Examples of this group are the G protein-coupled receptor kinases (GRKs), the cyclic nucleotide-dependent kinases (PKA, PKC, PKG), NDR or DBF2 kinases, ribosomal S6 kinases, AKT kinases, myotonic dystrophy kinases (DMPKs), MAPK interacting kinases (MNKs), MAST kinases, and the YANK family.

[0043] GRKs regulate signaling from heterotrimeric guanine protein coupled receptors (GPCRs). Mutations in GPCRs cause a number of human diseases, including retinitis pigmentosa, stationary night blindness, color blindness, hyperfunctioning thyroid adenomas, familial precocious puberty, familial hypocalciuric hypercalcemia and neonatal severe hyperparathroidism (OMIM, www.ncbi.nlm.nih.gov/Omim/). The regulation of GPCRs by GRKs indirectly implicates GRKs in these diseases.

[0044] The cAMP-dependent protein kinases (PKA) consist of heterotetramers comprised of 2 catalytic (C) and 2 regulatory (R) subunits, in which the R subunits bind to the second messenger cAMP, leading to dissociation of the active C subunits from the complex. Many of these kinases respond to second messengers such as cAMP resulting in a wide range of cellular responses to hormones and neurotransmitters.

[0045] AKT is a mammalian proto-oncoprotein regulated by phosphatidylinositol 3-kinase (PI3-K), which appears to function as a cell survival signal to protect cells from apoptosis. Insulin receptor, RAS, PI3-K, and PDK1 all act as upstream activators of AKT, whereas the lipid phosphatase PTEN functions as a negative regulator of the PI3-K/AKT pathway. Downstream targets for AKT-mediated cell survival include the pro-apoptotic factors BAD and Caspase9, and transcription factors in the forkhead family, such as DAF-16 in the worm. AKT is also an essential mediator in insulin signaling, in part due to its use of GSK-3 as another downstream target.

[0046] The S6 kinases (RSK) regulate a wide array of cellular processes involved in mitogenic response including protein synthesis, translation of specific mRNA species, and cell cycle progression from G1 to S phase. One of the RSK genes has been localized to chromosomal region 17q23 and is amplified in breast cancer (Couch, et al., Cancer Res. 1999 Apr. 1;59(7):1408-11).

[0047] CAMK Group

[0048] The CAMK kinases are also basic amino acid-directed kinases. They include the Ca²⁺/calmodulin-regulated and AMP-dependent protein kinases (AMPK), myosin light chain kinases (MLCK), MAP kinase activating protein kinases (MAPKAPKs), checkpoint 2 kinases (CHK2), death-associated protein kinases (DAPKs), phosphorylase kinase (PHK), Rac and Rho-binding Trio kinases, a “unique” family of CAMKs, and the MARK family of protein kinases.

[0049] The MARK family of STKs are involved in the control of cell polarity, microtubule stability and cancer. One member of the MARK family, C-TAK1, has been reported to control entry into mitosis by activating Cdc25C which in turn dephosphorylates Cdc2.

[0050] CMGC Group

[0051] The CMGC kinases are “proline-directed” enzymes phosphorylating residues that exist in a proline-rich context. They include the cyclin-dependent kinases (CDKs), mitogen-activated protein kinases (MAPKs), GSK3s, RCKs, (dual-specific tyrosine kinases) DYRKs, (SR-protein specific kinase) SRPKs, and CLKs. Most CMGC kinases have larger-than-average kinase domains owing to the presence of insertions within subdomains X and XI.

[0052] CDKs play a pivotal role in the regulation of mitosis during cell division. The process of cell division occurs in four stages: S phase, the period during which chromosomes duplicate, G2, mitosis and G1 or interphase. During mitosis the duplicated chromosomes are evenly segregated allowing each daughter cell to receive a complete copy of the genome. A key mitotic regulator in all eukaryotic cells is the STK cdc2, a CDK regulated by cyclin B. However some CDK-like kinases, such as CDK5 are not cyclin associated nor are they cell cycle regulated.

[0053] MAPKs play a pivotal role in many cellular signaling pathways, including stress response and mitogenesis (Lewis, T. S., Shapiro, P. S., and Ahn, N. G. (1998) Adv. Cancer Res. 74, 49-139). MAP kinases can be activated by growth factors such as EGF, and cytokines such as TNF-alpha. In response to EGF, Ras becomes activated and recruits Raf1 to the membrane where Raf1 is activated by mechanisms that may involve phosphorylation and conformational changes (Morrison, D. K., and Cutler, R. E. (1997) Curr. Opin. Cell Biol. 9, 174-179). Active Raf1 phosphorylates MEK1 which in turn phosphorylates and activates the ERKs subfamily of MAPKs. DYRKS are dual-specificity tyrosine kinases.

[0054] Tyrosine Protein Kinase Group

[0055] The tyrosine kinase group encompass both cytoplasmic (e.g. src) as well as transmembrane receptor tyrosine kinases (e.g. EGF receptor). These kinases play a pivotal role in the signal transduction processes that mediate cell proliferation, differentiation and apoptosis.

[0056] STE Group

[0057] The STE family refers to the 3 classes of protein kinases that lie sequentially upstream of the MAPKs. This group includes STE7 (MEK or MAP2K) kinases, STE11 (MEKK or MAP2K) kinases and STE20 (MEKKK or MAP4K) kinases. In humans, several protein kinase families that bear only distant homology with the STE11 family also operate at the level of MAP3Ks including RAF, MLK, TAK1, and COT. Since crosstalk takes place between protein kinases functioning at different levels of the MAPK cascade, the large number of STE family kinases could translate into an enormous potential for upstream signal specificity. This also includes homologues of the yeast sterile family kinases (STE), which refers to 3 classes of kinases which lie sequentially upstream of the MAPKs.

[0058] The prototype STE20 from baker's yeast is regulated by a hormone receptor, signaling to directly affect cell cycle progression through modulation of CDK activity. It also coordinately regulates changes in the cytoskeleton and in transcriptional programs in a bifurcating pathway. In a similar way, the homologous kinases in humans are likely to play a role in extracellular regulation of growth, cell adhesion and migration, and changes in transcriptional programs, all three of which have critical roles in tumorigenesis. Mammalian STE20-related protein kinases have been implicated in response to growth factors or cytokines, oxidative-, UV-, or irradiation-related stress pathways, inflammatory signals (e.g. TNFα), apoptotic stimuli (e.g. Fas), T and B cell costimulation, the control of cytoskeletal architecture, and cellular transformation. Typically the STE20-related kinases serve as upstream regulators of MAPK cascades. Examples include: HPK1, a protein-serine/threonine kinase (STK) that possesses a STE20-like kinase domain that activates a protein kinase pathway leading to the stress-activated protein kinase SAPK/JNK; PAK1, an STK with an upstream GTPase-binding domain that interacts with Rac and plays a role in cellular transformation through the Ras-MAPK pathway; and murine NIK, which interacts with upstream receptor tyrosine kinases and connects with downstream STE11-family kinases.

[0059] NEK kinases are related to NIMA, which is required for entry into mitosis in the filamentous fungus A. nidulans. Mutations in the nimA gene cause the nim (never in mitosis) G2 arrest phenotype in this fungus (Fry, A. M. and Nigg, E. A. (1995) Current Biology 5: 1122-1125). Several observations suggest that higher eukaryotes may have a NIMA functional counterpart(s): (1) expression of a dominant-negative form of NIMA in HeLa cells causes a G2 arrest; (2) overexpression of NIMA causes chromatin condensation, not only in A. nidulans, but also in yeast, Xenopus oocytes and HeLa cells (Lu, K. P. and Hunter, T. (1995) Prog. Cell Cycle Res. 1, 187-205); (3) NIMA when expressed in mammalian cells interacts with pin1, a prolyl-prolyl isomerase that functions in cell cycle regulation (Lu, K. P. et al. (1996) Nature 380, 544-547); (4) okadaic acid inhibitor studies suggests the presence of cdc2-independent mechanism to induce mitosis (Ghosh, S. et al.(1998) Exp. Cell Res. 242, 1-9) and (5) a NIMA-like kinase (fin1) exists in another eukaryote besides Aspergillus, Saccharomyces pombe (Krien, M. J. E. et al.(1998) J. Cell Sci. 111, 967-976). Eleven mammalian NIMA-like kinases have been identified —NEK1-11. Despite the similarity of the NIMA-related kinases to NIMA over the catalytic region, the mammalian kinases are structurally different to NIMA over the extracatalytic regions. In addition several of the mammalian kinases are unable to complement the nim phenotype in Aspergillus nimA mutants.

[0060] Casein Kinase 1 Group

[0061] The CK1 family represents a distant branch of the protein kinase family. The hallmarks of protein kinase subdomains VIII and IX are difficult to identify. One or more forms are ubiquitously distributed in mammalian tissues and cell lines. CK1 kinases are found in cytoplasm, in nuclei, membrane-bound, and associated with the cytoskeleton. Splice variants differ in their subcellular distribution. VRK is in this group.

[0062] TKL Group

[0063] This group includes integrin receptor kinase (IRAK); endoribonuclease-associated kinases (IRE); Mixed lineage kinase (MLK); LIM-domain containing kinase (LIMK); Receptor interacting protein kinase (RIPK); RAF; Serine-threonine kinase receptors (STKR).

[0064] RIPK2 is a serine-threonine kinase associated with the tumor necrosis factor (TNF) receptor complex and is implicated in the activation of NF-kappa B and cell death in mammalian cells. It has recently been demonstrated that RIPK2 activates the MAPK pathway (Navas, et al., J. Biol. Chem. 1999 Nov. 19;274(47):33684-33690). RIPK2 activates AP-1 and serum response element regulated expression by inducing the activation of the Elk1 transcription factor. RIPK2 directly phosphorylates and activates ERK2 in vivo and in vitro. RIPK2 in turn is activated through its interaction with Ras-activated Raf1. These results highlight the integrated nature of kinase signaling pathway.

[0065] “Other” Group

[0066] Several families cluster within a group of unrelated kinases termed “Other”. Group members that define smaller, yet distinct phylogenetic branches conventional kinases include CHK1; Elongation 2 factor kinases (EIFK); Calcium-calmodulin kinase kinases (CAMKK); IkB kinases (IKK); endoribonuclease-associated kinases (IRE); MOS; PIM; TAK1; Testis specific kinase (TSSK); tousled-related kinase (TLK); UNC51-related kinase (UNC); WEE; mitotic kinases (BUB1, AURORA, PLK, and NIMA/NEK); several families that are close homologues to worm (C26C2.1, YQ09, ZC581.9, YFL033c, C24A1.3); Drosophila (SLOB), or yeast (YDOD_sp, YGR262_sc) kinases; and others that are “unique,” that is, those which do not cluster into any obvious family. Additional families are even less well defined and first were identified in lower eukaryotes such as yeast or worms (YNL020, YPL236, YQ09, YWY3, SCY1, C01H6.9, C26C2.1).

[0067] The tousled (TSL) kinase was first identified in the plant Arabidopsis thaliana. TSL encodes a serine/threonine kinase that is essential for proper flower development. Human tousled-like kinases (Tlks) are cell-cycle-regulated enzymes, displaying maximal activities during S phase. This regulated activity suggests that Tlk function is linked to ongoing DNA replication (Sillje, et al., EMBO J. 1999 Oct. 15; 18(20):5691-5702).

[0068] BRSK Subfamily

[0069] The BRSK subfamily family of kinases includes the mammalian BRSK1 and BRSK2, SAD-1 from C. elegans, CG6114 from Drosophila and the HrPOPK-1 gene from the primitive chordate Halocynthia roretzi. SAD-1 is expressed in neurons and required for presynaptic vesicle function (Crump et al. (2001) Neuron 29:115-29). BRSK1 and BRSK2 are selectively expressed in brain, and HrPOPK-1 is selectively expressed in the nervous system, indicating that all members of this family have a neural function, specifically related to synaptic vesicle function.

[0070] The NRBP family includes mammalian kinases NRBP1 and NRBP2, as well as homologs in C. elegans (H37N21.1) and D. melanogaster (LD28657). These kinases are most closely related in sequence to the WNK family of kinases, and may fulfill similar functions, including a role in hypertension.

[0071] Additionally, where BRSK2 is classsified as a member of the CAMKL family (p102), it should be further classified—i.e. “into the CAMK group, the CAMKL family and the BRSK sub-family”.

[0072] Atypical Protein Kinase Group

[0073] There are several proteins with protein kinase activity that appear structurally unrelated to the eukaryotic protein kinases. These include; Dictyostelium myosin heavy chain kinase A (MHCKA), Physarum polycephalum actin-fragmin kinase, the human A6 PTK, human BCR, mitochondrial pyruvate dehydrogenase and branched chain fatty acid dehydrogenase kinase, and the prokaryotic “histidine” protein kinase family. The slime mold, worm, and human eEF-2 kinase homologues have all been demonstrated to have protein kinase activity, yet they bear little resemblance to conventional protein kinases except for the presence of a putative GxGxxG ATP-binding motif.

[0074] The so-called histidine kinases are abundant in prokaryotes, with more than 20 representatives in E. coli, and have also been identified in yeast, molds, and plants. In response to external stimuli, these kinases act as part of two-component systems to regulate DNA replication, cell division, and differentiation through phosphorylation of an aspartate in the target protein. To date, no “histidine” kinases have been identified in metazoans, although mitochondrial pyruvate dehydrogenase (PDK) and branched chain alpha-ketoacid dehydrogenase kinase (BCKD kinase), are related in sequence. PDK and BCKD kinase represent a unique family of atypical protein kinases involved in regulation of glycolysis, the citric acid cycle, and protein synthesis during protein malnutrition. Structurally they conserve only the C-terminal portion of “histidine” kinases including the G box regions. BCKD kinase phosphorylates the E1a subunit of the BCKD complex on Ser-293, proving it to be a functional protein kinase. Although no bona fide “histidine” kinase has yet been identified in humans, they do contain PDK.

[0075] Several other proteins contain protein kinase-like homology including: receptor guanylyl cyclases, diacylglycerol kinases, choline/ethanolamine kinases, and YLK1-related antibiotic resistance kinases. Each of these families contain short motifs that were recognized by our profile searches with low scoring E-values, but a priori would not be expected to function as protein kinases. Instead, the similarity could simply reflect the modular nature of protein evolution and the primal role of ATP binding in diverse phosphotransfer enzymes. However, two recent papers on a bacterial homologue of the YLK1 family suggests that the aminoglycoside phosphotransferases (APHs) are structurally and functionally related to protein kinases. There are over 40 APHs identified from bacteria that are resistant to aminoglycosides such as kanamycin, gentamycin, or amikacin. The crystal structure of one well characterized APH reveals that it shares greater than 40% structural identity with the 2 lobed structure of the catalytic domain of cAMP-dependent protein kinase (PKA), including an N-terminal lobe composed of a 5-stranded antiparallel beta sheet and the core of the C-terminal lobe including several invariant segments found in all protein kinases. APHs lack the GxGxxG normally present in the loop between beta strands 1 and 2 but contain 7 of the 12 strictly conserved residues present in most protein kinases, including the HGDxxxN signature sequence in kinase subdomain VIB. Furthermore, APH also has been shown to exhibit protein-serine/threonine kinase activity, suggesting that other YLK-related molecules may indeed be functional protein kinases.

[0076] The eukaryotic lipid kinases (PI3Ks, PI4Ks, DAGKs and PIPKs) also contain several short motifs similar to protein kinases, but otherwise share minimal primary sequence similarity. However, once again structural analysis of PIPKII-beta defines a conserved ATP-binding core that is strikingly similar to conventional protein kinases. Three residues are conserved among all of these enzymes including (relative to the PKA sequence) Lys-72 which binds the gamma-phosphate of ATP, Asp-166 which is part of the HRDLK motif and Asp-184 from the conserved Mg⁺⁺ or Mn⁺⁺ binding DFG motif. The worm genome contains 12 phosphatidylinositol kinases, including 3 PI13-kinases, 2 PI4-kinases, 3 PIP5-kinases, and 4 PI3-kinase-related kinases. The latter group has 6 mammalian members (DNA-PK, SMG1, TRRAP, FRAP/TOR, ATM, and ATR), which have been shown to participate in the maintenance of genomic integrity in response to DNA damage, and exhibit true protein kinase activity, raising the possibility that other PI-kinases may also act as protein kinases. Regardless of whether they have true protein kinase activity, PI3-kinases are tightly linked to protein kinase signaling, as evidenced by their involvement downstream of many growth factor receptors and as upstream activators of the cell survival response mediated by the AKT protein kinase.

### SUMMARY OF THE INVENTION

[0077] The present invention relates, in part, to mammalian protein kinases and protein kinase-like enzymes identified from genomic and cDNA sequencing.

[0078] Tyrosine and serine/threonine kinases (PTKs and STKs) have been identified and their protein sequence predicted as part of the instant invention. Mammalian members of these families were identified through the use of a bioinformatics strategy. The partial or complete sequences of these kinases are presented here, together with their classification.

[0079] One aspect of the invention features an identified, isolated, enriched, or purified nucleic acid molecule encoding a kinase polypeptide having an amino acid sequence selected from the group consisting of those set forth in SEQ ID NO:115 through SEQ ID NO:228.

[0080] The term “identified” in reference to a nucleic acid means that a sequence was selected from a genomic, EST, or cDNA sequence database based on it being predicted to encode a portion of a previously unknown or novel protein kinase.

[0081] By “isolated,” in reference to nucleic acid, is meant a polymer of 10, 15, or 18 (preferably 21, more preferably 39, most preferably 75) or more nucleotides conjugated to each other, including DNA and RNA that is isolated from a natural source or that is synthesized as the sense or complementary antisense strand. In certain embodiments of the invention, longer nucleic acids are preferred, for example those of 100, 200, 300, 400, 500, 600, 900, 1200, 1500, or more nucleotides and/or those having at least 50%, 60%, 75%, 80%, 85%, 90%, 91%, 92%, 93%, 94%, 95%, 96%, 97%, 98%, 99% or 100% identity to a sequence selected from the group consisting of those set forth in SEQ ID NO:1 through SEQ ID NO:114 or encoding for amino acid selected from SEQ ID NO:115 through SEQ ID NO:228.

[0082] The isolated nucleic acid of the present invention is unique in the sense that it is not found in a pure or separated state in nature. Use of the term “isolated” indicates that a naturally occurring sequence has been removed from its normal cellular (i.e., chromosomal) environment. Thus, the sequence may be in a cell-free solution or placed in a different cellular environment. The term does not imply that the sequence is the only nucleotide chain present, but that it is essentially free (about 90-95% pure at least) of non-nucleotide material naturally associated with it, and thus is distinguished from isolated chromosomes.

[0083] By the use of the term “enriched” in reference to nucleic acid is meant that the specific DNA or RNA sequence constitutes a significantly higher fraction (2- to 5-fold) of the total DNA or RNA present in the cells or solution of interest than in normal or diseased cells or in the cells from which the sequence was taken. This could be caused by a person by preferential reduction in the amount of other DNA or RNA present, or by a preferential increase in the amount of the specific DNA or RNA sequence, or by a combination of the two. However, it should be noted that enriched does not imply that there are no other DNA or RNA sequences present, just that the relative amount of the sequence of interest has been significantly increased. The term “significant” is used to indicate that the level of increase is useful to the person making such an increase, and generally means an increase relative to other nucleic acids of about at least 2-fold, more preferably at least 5- to 10-fold or even more. The term also does not imply that there is no DNA or RNA from other sources. The DNA from other sources may, for example, comprise DNA from a yeast or bacterial genome, or a cloning vector such as pUC 19. This term distinguishes from naturally occurring events, such as viral infection, or tumor-type growths, in which the level of one mRNA may be naturally increased relative to other species of mRNA. That is, the term is meant to cover only those situations in which a person has intervened to elevate the proportion of the desired nucleic acid.

[0084] It is also advantageous for some purposes that a nucleotide sequence be in purified form. The term “purified” in reference to nucleic acid does not require absolute purity (such as a homogeneous preparation). Instead, it represents an indication that the sequence is relatively more pure than in the natural environment (compared to the natural level this level should be at least 2- to 5-fold greater, e.g., in terms of mg/mL). Individual clones isolated from a cDNA library may be purified to electrophoretic homogeneity. The claimed DNA molecules obtained from these clones could be obtained directly from total DNA or from total RNA. The cDNA clones are not naturally occurring, but rather are preferably obtained via manipulation of a partially purified naturally occurring substance (messenger RNA). The construction of a cDNA library from mRNA involves the creation of a synthetic substance (cDNA) and pure individual cDNA clones can be isolated from the synthetic library by clonal selection of the cells carrying the cDNA library. Thus, the process which includes the construction of a cDNA library from mRNA and isolation of distinct cDNA clones yields an approximately 10⁶-fold purification of the native message. Thus, purification of at least one order of magnitude, preferably two or three orders, and more preferably four or five orders of magnitude is expressly contemplated.

[0085] By a “kinase polypeptide” is meant 32 (preferably 40, more preferably 45, most preferably 55) or more contiguous amino acids in a polypeptide having an amino acid sequence selected from the group consisting of those set forth in SEQ ID NO:115 through SEQ ID NO:228. In certain aspects, polypeptides of 75, 100, 200, 300, 400, 450, 500, 550, 600, 700, 800, 900 or more amino acids are preferred. The kinase polypeptide can be encoded by a full-length nucleic acid sequence or any portion (e.g., a “fragment” as defined herein) of the full-length nucleic acid sequence, so long as a functional activity of the polypeptide is retained, including, for example, a catalytic domain, as defined herein, or a portion thereof. One of skill in the art would be able to select those catalytic domains, or portions thereof, which exhibit a kinase or kinase-like activity, e.g., catalytic activity, as defined herein. It is well known in the art that due to the degeneracy of the genetic code numerous different nucleic acid sequences can code for the same amino acid sequence. Equally, it is also well known in the art that conservative changes in amino acid can be made to arrive at a protein or polypeptide which retains the functionality of the original. Such substitutions may include the replacement of an amino acid by a residue having similar physicochemical properties, such as substituting one aliphatic residue (Ile, Val, Leu or Ala) for another, or substitution between basic residues Lys and Arg, acidic residues Glu and Asp, amide residues Gln and Asn, hydroxyl residues Ser and Tyr, or aromatic residues Phe and Tyr. Further information regarding making amino acid exchanges which have only slight, if any, effects on the overall protein can be found in Bowie et al., Science, 1990, 247, 1306-1310, which is incorporated herein by reference in its entirety including any figures, tables, or drawings. In all cases, all permutations are intended to be covered by this disclosure.

[0086] The amino acid sequence of a kinase polypeptide of the invention comprises an amino acid sequence substantially similar (preferably at least about 90% identical) to a sequence having an amino acid sequence selected from the group consisting of those set forth in SEQ ID NO:115 through SEQ ID NO:228, or the corresponding full-length amino acid sequence, or fragments thereof, preferably consisting of at least one domain selected from the group consisting of an N-terminal domain, a C-terminal catalytic domain, a catalytic domain, a C-terminal domain, a coiled-coil structure region, a proline-rich region, a spacer region and a C-terminal tail of SEQ ID NO:115 through 228. A fusion polypeptide comprises a kinase polypeptide of the invention and a heterologous polypeptide.

[0087] A sequence that is substantially similar to a sequence selected from the group consisting of those set forth in SEQ ID NO:115 through SEQ ID NO:228, will preferably have at least 70%, 80%, 85%, 90%, 91%, 92%, 93%, 94%, 95%, 96%, 97%, 98%, 99% or 100% identity to the sequence.

[0088] By “identity” is meant a property of sequences that measures their similarity or relationship. Identity is measured by dividing the number of identical residues by the total number of residues and gaps and multiplying the product by 100. “Gaps” are spaces in an alignment that are the result of additions or deletions of amino acids. Thus, two copies of exactly the same sequence have 100% identity, but sequences that are less highly conserved, and have deletions, additions, or replacements, may have a lower degree of identity. Those skilled in the art will recognize that several computer programs are available for determining sequence identity using standard parameters, for example Gapped BLAST or PSI-BLAST (Altschul, et al. (1997) Nucleic Acids Res. 25:3389-3402), BLAST (Altschul, et al. (1990) J. Mol. Biol. 215:403-410), and Smith-Waterman (Smith, et al. (1981) J. Mol. Biol. 147:195-197). Preferably, the default settings of these programs will be employed, but those skilled in the art recognize whether these settings need to be changed and know how to make the changes.

[0089] “Similarity” is measured by dividing the number of identical residues plus the number of conservatively substituted residues (see Bowie, et al. Science, 1999), 247, 1306-1310, which is incorporated herein by reference in its entirety, including any drawings, figures, or tables) by the total number of residues and gaps and multiplying the product by 100.

[0090] In preferred embodiments, the invention features isolated, enriched, or purified nucleic acid molecules encoding a kinase polypeptide comprising a nucleotide sequence that:
[0091] (a) encodes a polypeptide having an amino acid sequence selected from the group consisting of those set forth in SEQ ID NO:115 through SEQ ID NO:228 or an amino acid sequence having at least about 90% identical to a sequence selected from the group consisting of SEQ ID NO:115 through SEQ ID NO:228; (b) is the complement of the nucleotide sequence of (a); (c) hybridizes under highly stringent conditions to the nucleotide molecule of (a) and encodes a naturally occurring kinase polypeptide; (d) encodes a polypeptide having an amino acid sequence of at least one domain selected from the group consisting of an N-terminal domain, a C-terminal catalytic domain, a catalytic domain, a C-terminal domain, a coiled-coil structure region, a proline-rich region, a spacer region and a C-terminal tail of SEQ ID NO:115 through SEQ ID NO:228; or (e) is the complement of the nucleotide sequence of (d). Additional domains encoded include, for example, CNH, PH, phobol esters/diacylglycerol binding (C1), protein kinase C-terminal, PDZ (also known as DHR or GLGF), kinase associated domain 1, UBA/TS-N, UBA, armadillo/beta-catenin-like repeat, POLO box duplicated region, P21-Rho-binding, immunoglobulin, WIF, leucine rich repeat, SH3, MYND, EF hand, and bromodomain.

[0092] The term “domain” refers to a region of a polypeptide whose sequence or structure is conserved between several homologs of the polypoeptide and which serves a particular function. Many domains may be identified by searching the Pfam database of domain models (pfam.wustl.edu) which provides coordinates on the polypeptide delimiting the start and end of the domain, as well as a score giving the likelihood that the domain is present in the polypeptide. Other domains may be identified by specialized programs, such as the COILS program to detect colied-coil regions (www.ch.embnet.org/software/COILS_form.html), the SignalP program to detect signal peptides (www.ebs.dtu.dk/services/TMHMM), by visual inspection of the amino acid sequence (e.g., determination of cysteine-rich or proline-rich domains), or by Smith-Waterman alignment shows a high level of sequence similarity in the region containing the domain, it may be concluded that the domain is present in both proteins within that region. which serves a particular function.

[0093] Domains of signal transduction proteins can serve functions including, but not limited to, binding molecules that localize the signal transduction molecule to different regions of the cell, binding other signaling molecules directly responsible for propagating a particular cellular signal or binding molecules that influence the function of the protein. Some domains can be expressed separately from the rest of the protein and function by themselves.

[0094] The term “N-terminal region” refers to the extracatalytic region located between the initiator methionine and the catalytic domain of the protein kinase. Depending on its length, the N-terminal region may or may not play a regulatory role in kinase function. An example of a protein kinase whose N-terminal domain has been shown to play a regulatory role is PAK6 or PAK5, which contains a CRIB motif used for Cdc42 and rac binding (Burbelo, P. D. et al. (1995) J. Biol. Chem. 270, 29071-29074). Such an N-terminal region is also termed a N-terminal functional domain or N-terminal domain.

[0095] The term “catalytic domain” or protein kinase domain refers to a region of the protein kinase that is typically 25-300 amino acids long and is responsible for carrying out the phosphate transfer reaction from a high-energy phosphate donor molecule such as ATP or GTP to itself (autophosphorylation) or to other proteins (exogenous phosphorylation). The catalytic domain of protein kinases is made up of 12 subdomains that contain highly conserved amino acid residues, and are responsible for proper polypeptide folding and for catalysis. The catalytic dmoain can be defined with reference to the parameters described in a “Pfam” database: pfam.wustl.edu. In particular, it can be defined with reference to a HMMer search of the Pfam database. In the N-terminal extremity of the catalytic domain there is a glycine rich stretch of residues in the vicinity of a lysine residue, which has been shown to be involved in ATP binding. In the central part of the catalytic domain there is a conserved aspartic acid residue which is important for the catalytic activity of the enzyme. See Accession number PF00069 of pfam.wustl.edu.

[0096] The term “catalytic activity”, as used herein, defines the rate at which a kinase catalytic domain phosphorylates a substrate. Catalytic activity can be measured, for example, by determining the amount of a substrate converted to a phosphorylated product as a function of time. Catalytic activity can be measured by methods of the invention by determining the concentration of a phosphorylated substrate after a fixed period of time. Phosphorylation of a substrate occurs at the active site of a protein kinase. The active site is normally a cavity in which the substrate binds to the protein kinase and is phosphorylated.

[0097] The term “substrate” as used herein refers to a molecule phosphorylated by a kinase of the invention. Kinases phosphorylate substrates on serine/threonine or tyrosine amino acids. The molecule may be another protein or a polypeptide.

[0098] The term “C-terminal region” refers to the region located between the catalytic domain or the last (located closest to the C-terminus) functional domain and the carboxy-terminal amino acid residue of the protein kinase. See Accession number PF00433 of pfam.wustl.edu. Depending on its length and amino acid composition, the C-terminal region may or may not play a regulatory role in kinase function. An example of a protein kinase whose C-terminal region may play a regulatory role is PAK3 which contains a heterotrimeric G_{b} subunit-binding site near its C-terminus (Leeuw, T. et al. (1998) Nature, 391, 191-195). Such a C-terminal region is also termed a C-terminal functional domain or C-terminal domain.

[0099] By “functional” domain is meant any region of the polypeptide that may play a regulatory or catalytic role as predicted from amino acid sequence homology to other proteins or by the presence of amino acid sequences that may give rise to specific structural conformations.

[0100] The “CNH domain” is the citron homology domain, and is often found after cysteine rich and pleckstrin homology (PH) domains at the C-terminal end of the proteins [MEDLINE:99321922]. It acts as a regulatory domain and could be involved in macromolecular interactions [MEDLINE:99321922], [MEDLINE:97280817]. See Accession number PF00780 of pfam.wustl.edu.

[0101] The “PH domain” is the ‘pleckstrin homology’ (PH) domain and is a domain of about 100 residues that occurs in a wide range of proteins involved in intracellular signaling or as constituents of the cytoskeleton [MEDLINE:93272305], [MEDLINE:93268380], [MEDLINE:94054654], [MEDLINE:95076505], [MEDLINE:95157628], [MEDLINE:95197706], [MEDLINE:96082954]. See Accession number PF00169 of pfam.wustl.edu.

[0102] The “Phorbol esters/diacylglycerol binding domain” is also known as the Protein kinase C conserved region 1 (C1) domain. The N-terminal region of PKC, known as C1, has been shown [MEDLINE:89296905] to bind PE and DAG in a phospholipid and zinc-dependent fashion. The C1 region contains one or two copies (depending on the isozyme of PKC) of a cysteine-rich domain about 50 amino-acid residues long and essential for DAG/PE-binding. The DAG/PE-binding domain binds two zinc ions; the ligands of these metal ions are probably the six cysteines and two histidines that are conserved in this domain. See Accession number PF00130 of pfam.wustl.edu.

[0103] The “PDZ domain” is also known as the DHR or GLGF domain. PDZ domains are found in diverse signaling proteins and may function in targeting signalling molecules to sub-membranous sites [MEDLINE:97348826]. See Accession number PF00595 of pfam.wustl.edu.

[0104] The “kinase associated domain 1” (KA1) domain is found in the C-terminal extremity of various serine/threonine-protein kinases from fungi, plants and animals. See Accession number PF02149 of pfam.wustl.edu.

[0105] The UBA/TS-N domain is composed of three alpha helices. This family includes the previously defined UBA and TS-N domains. The UBA-domain (ubiquitin associated domain) is a sequence motif found in several proteins having connections to ubiquitin and the ubiquitination pathway. The structure of the UBA domain consists of a compact three helix bundle. This domain is found at the N terminus of EF-TS hence the name TS-N. The structure of EF-TS is known and this domain is implicated in its interaction with EF-TU. The domain has been found in non EF-TS proteins such as alpha-NAC P70670 and MJ0280 Q57728 [1]. See Accession number PF00627 of pfam.wustl.edu.

[0106] The “UBA domain” The UBA-domain (ubiquitin associated domain) is a novel sequence motif found in several proteins having connections to ubiquitin and the ubiquitination pathway [MEDLINE:97025177]. The UBA domain is probably a non-covalent ubiquitin binding domain consisting of a compact three helix bundle [MEDLINE:99061330]. See Accession number PF00627 of pfam.wustl.edu.

[0107] The “armadillo/beta-catenin-like repeat” is an approximately 40 amino acid long tandemly repeated sequence motif first identified in the Drosophila segment polarity gene armadillo. Similar repeats were later found in the mammalian armadillo homolog beta-catenin, the junctional plaque protein plakoglobin, the adenomatous polyposis coli (APC) tumor suppressor protein, and a number of other proteins [MEDLINE:94170379]. The 3 dimensional fold of an armadillo repeat is known from the crystal structure of beta-catenin [MEDLINE:98449700]. There, the 12 repeats form a superhelix of alpha-helices, with three helices per unit. The cylindrical structure features a positively charged grove which presumably interacts with the acidic surfaces of the known interaction partners of beta-catenin. See Accession number PF00514 of pfam.wustl.edu.

[0108] The “POLO box duplicated region” (POLO_box) is described as follows. A subgroup of serine/threonine protein kinases (IPR002290) playing multiple roles during cell cycle, especially in M phase progression and cytokinesis, contain a duplicated domain in their C terminal part, the polo box [MEDLINE:99116035]. The domain is named after its founding member encoded by the polo gene of Drosophila [MEDLINE:92084090]. This domain of around 70 amino acids has been found in species ranging from yeast to mammals. Point mutations in the Polo box of the budding yeast Cdc5 protein abolish the ability of overexpressed Cdc5 to interact with the spindle poles and to organize cytokinetic structures [MEDLINE:20063188]. See Accession number PF00659 of pfam.wustl.edu.

[0109] The “P21-Rho-binding domain” is one of a group of small domains that bind Cdc42p- and/or Rho-like small GTPases. These are also known as the Cdc42/Rac interactive binding (CRIB). See Accession number PF00786 of pfam.wustl.edu.

[0110] The “immunoglobulin domain” is a domain that is under the umbrella of the immunoglobulin superfamily. Examples of the superfamily include antibodies, the giant muscle kinase titin and receptor tyrosine kinases. Immunoglobulin-like domains may be involved in protein-protein and protein-ligand interactions. The Pfam alignments do not include the first and last strand of the immunoglobulin-like domain. See Accession number PF00047 of pfam.wustl.edu.

[0111] The “WIF domain” is found in the RYK tyrosine kinase receptors and WIF the Wnt-inhibitory-factor. The domain is extracellular and and contains two conserved cysteines that may form a disulphide bridge. This domain is Wnt binding in WIF, and it has been suggested that RYK may also bind to Wnt [MEDLINE:20105592]. See Accession number PF02019 of pfam.wustl.edu.

[0112] The “leucine rich repeat”—Leucine-rich repeats (LRRs) are relatively short motifs (22-28 residues in length) found in a variety of cytoplasmic, membrane and extracellular proteins [MEDLINE:91099665]. Although these proteins are associated with widely different functions, a common property involves protein-protein interaction. Other functions of LRR-containing proteins include, for example, binding to enzymes [MEDLINE:90094386] and vascular repair [MEDLINE:89367331]. See Accession number PF00560 of pfam.wustl.edu.

[0113] The “SH3 domain” SH3 (src Homology-3) domains are small protein modules containing approximately 50 amino acid residues [PUB00001025]. They are found in a variety of of proteins with enzymatic activity. The SH3 domain has a characteristic fold which consists of five or six beta-strands arranged as two tightly packed anti-parallel beta sheets. The linker regions may contain short helices [PUB00001083]. See Accession number PF00018 of pfam.wustl.edu.

[0114] The “MYND finger” is a domain found in some suppressors of cell cycle entry [MEDLINE:96203118], [MEDLINE:98079069]. The MYND zinc finger (ZnF) domain is one of two domains in AML/ETO fusion protein required for repression of basal transcription from the multidrug resistance 1 (MDR-1) promoter. The other domain is a hydrophobic heptad repeat (HHR) motif [MEDLINE:98252948]. The AML-1/ETO fusion protein is created by the (8;21) translocation, the second most frequent chromosomal abnormality associated with acute myeloid leukemia. In the fusion protein the AML-1 runt homology domain, which is responsible for DNA binding and CBF beta interaction, is linked to ETO, a gene of unknown function [MEDLINE:96068903]. See Accession number PF01753 of pfam.wustl.edu.

[0115] The “EF hand” domain is described as follows: many calcium-binding proteins belong to the same evolutionary family and share a type of calcium-binding domain known as the EF-hand. This type of domain consists of a twelve residue loop flanked on both side by a twelve residue alpha-helical domain. In an EF-hand loop the calcium ion is coordinated in a pentagonal bipyramidal configuration. The six residues involved in the binding are in positions 1, 3, 5, 7, 9 and 12; these residues are denoted by X, Y, Z, −Y, −X and −Z. The invariant Glu or Asp at position 12 provides two oxygens for liganding Ca (bidentate ligand). See Accession number PF00036 of pfam.wustl.edu.

[0116] A “bromodomain” is a 110 amino acid long domain, found in many chromatin associated proteins. Bromodomains can interact specifically with acetylated lysine. [MEDLINE:97318593] Bromodomains are found in a variety of mammalian, invertebrate and yeast DNA-binding proteins [MEDLINE:92285152]. The bromodomain may occur as a single copy, or in duplicate. The bromodomain may be involved in protein-protein interactions and may play a role in assembly or activity of multi-component complexes involved in transcriptional activation [MEDLINE:96022440]. See Accession number PF00439 of pfam.wustl.edu.

[0117] The term “coiled-coil structure region” as used herein, refers to a polypeptide sequence that has a high probability of adopting a coiled-coil structure as predicted by computer algorithms such as COILS (Lupas, A. (1996) Meth. Enzymology 266:513-525). Coiled-coils are formed by two or three amphipathic α-helices in parallel. Coiled-coils can bind to coiled-coil domains of other polypeptides resulting in homo- or heterodimers (Lupas, A. (1991) Science 252:1162-1164). Coiled-coil-dependent oligomerization has been shown to be necessary for protein function including catalytic activity of serine/threonine kinases (Roe, J. et al. (1997) J. Biol. Chem. 272:5838-5845).

[0118] The term “proline-rich region” as used herein, refers to a region of a protein kinase whose proline content over a given amino acid length is higher than the average content of this amino acid found in proteins(i.e., >10%). Proline-rich regions are easily discernable by visual inspection of amino acid sequences and quantitated by standard computer sequence analysis programs such as the DNAStar program EditSeq. Proline-rich regions have been demonstrated to participate in regulatory protein-protein interactions. Among these interactions, those that are most relevant to this invention involve the “PxxP” proline rich motif found in certain protein kinases (i.e., human PAK1) and the SH3 domain of the adaptor molecule Nck (Galisteo, M. L. et al. (1996) J. Biol. Chem. 271:20997-21000). Other regulatory interactions involving “PxxP” proline-rich motifs include the WW domain (Sudol, M. (1996) Prog. Biochys. Mol. Bio. 65:113-132).

[0119] The term “spacer region” as used herein, refers to a region of the protein kinase located between predicted functional domains. The spacer region has little conservation when compared with any any amino acid sequence in the database, and can be identified by using a Smith-Waterman alignment of the protein sequence against the non-redundant protein of Pfam database to define the C- and N-terminal boundaries of the flanking functional domains. Spacer regions may or may not play a fundamental role in protein kinase function. Precedence for the regulatory role of spacer regions in kinase function is provided by the role of the src kinase spacer in inter-domain interactions (Xu, W. et al. (1997) Nature 385:595-602).

[0120] The term “insert” as used herein refers to a portion of a protein kinase that is absent from a close homolog. Inserts may or may not by the product alternative splicing of exons. Inserts can be identified by using a Smith-Waterman sequence alignment of the protein sequence against the non-redundant protein database, or by means of a multiple sequence alignment of homologous sequences using the DNAStar program Megalign. Inserts may play a functional role by presenting a new interface for protein-protein interactions, or by interfering with such interactions.

[0121] The term “signal transduction pathway” refers to the molecules that propagate an extracellular signal through the cell membrane to become an intracellular signal. This signal can then stimulate a cellular response. The polypeptide molecules involved in signal transduction processes are typically receptor and non-receptor protein kinases, receptor and non-receptor protein phosphatases, polypeptides containing SRC homology 2 and 3 domains, phosphotyrosine binding proteins (SRC homology 2 (SH2) and phosphotyrosine binding (PTB and PH) domain containing proteins), proline-rich binding proteins (SH3 domain containing proteins), GTPases, phosphodiesterases, phospholipases, prolyl isomerases, proteases, Ca2+ binding proteins, cAMP binding proteins, guanyl cyclases, adenylyl cyclases, NO generating proteins, nucleotide exchange factors, and transcription factors.

[0122] In other embodiments, the nucleic acid encoding a kinase polypeptide, or fragment thereof comprises a nucleotide sequence which hybridizes under stringent conditions to a nucleotide sequence encoding a kinase polypeptide having an amino acid sequence selected from the group consisting of those set for the in SEQ ID NO:115 through 228; or hybridizes under stringent conditions to a nucleotide sequence selected from the group consisting of those set forth in SEQ ID NO:1 through 114. The nucleic acid may encode a fusion polypeptide comprising at least one domain of SEQ ID NO:115 through 228, and a heterologous polypeptide.

[0123] In various embodiments, the nucleic acid encoding a kinase polypeptide, or fragment thereof, further comprises a vector or promoter effective to initiate transcription in a host cell. Optionally, the nucleic acid molecule may be isolated, enriched, or purified from a mammal, such as a mouse. Alternatively, the nucleic acid molecule may be a cDNA molecule or a genomic DNA molecule. Also provided are recombinant cells comprising a nucleic acid encoding a kinase polypeptide, or fragment thereof; and a method for producing a kinase polypeptide comprising culturing such a recombinant cell under conditions that would allow expression of the nucleic acid molecule and isolating the expressed polypeptide.

[0124] The invention includes an antibody or antibody fragment having specific binding affinity to a kinase polypeptide or to a domain of said polypeptide, wherein said polypeptide comprises an amino acid sequence selected from those set forth in SEQ ID NO:115 through SEQ ID NO:228, a hybridoma which produces the such an antibody or antibody fragment, a kit comprising such an antibody which binds to a polypeptide of the invention a negative control antibody.

[0125] The invention includes a method for identifying a substance that modulates the activity of a kinase polypeptide comprising the steps of:(a)contacting the kinase polypeptide substantially identical to an amino acid sequence selected from the group consisting of those set forth in SEQ ID NO:115 through SEQ ID NO:228 with a test substance; (b)measuring the activity of said polypeptide; and (c)determining whether said substance modulates the activity of said polypeptide. Such a method may further comprise attaching the kinase polypeptide to a solid support, such as plastic (e.g., mictrotiter plate well), glass (e.g., beads), a matrix, an array, and the like.

[0126] The invention also includes a method for identifying a substance that modulates the activity of a kinase polypeptide in a cell comprising the steps of: expressing a kinase polypeptide having a sequence that is at least about 90% identical to an amino acid sequence selected from the group consisting of those set forth in SEQ ID NO:115 through SEQ ID NO:228; adding a test substance to said cell; and monitoring kinase activity in the cell, a change in cell phenotype, or the interaction between said polypeptide and a natural binding partner.

[0127] The invention includes a method for treating a disease or disorder by administering to a patient in need of such treatment a substance that modulates the activity of a kinase substantially identical (preferably at least about 90% identical) to an amino acid sequence selected from the group consisting of those set forth in SEQ ID NO:115 through SEQ ID NO:228.

[0128] The treatment methods of the invention include the disease or disorder is selected from the group consisting of cancers, immune-related diseases and disorders, cardiovascular disease, brain or neuronal-associated diseases, metabolic disorders and inflammatory disorders; and the disease or disorder selected from the group consisting of cancers of tissues; cancers of blood or hematopoietic origin; cancers of the breast, colon, lung, prostate, cervix, brain, ovaries, bladder or kidney. The treatment methods also include the disease or disorder is selected from the group consisting of disorders of the central or peripheral nervous system; migraines; pain; sexual dysfunction; mood disorders; attention disorders; cognition disorders; hypotension; hypertension; psychotic disorders; neurological disorders and dyskinesias. Treatment methods also include disease or disorder selected from the group consisting of inflammatory disorders including rheumatoid arthritis, chronic inflammatory bowel disease, chronic inflammatory pelvic disease, multiple sclerosis, asthma, osteoarthritis, psoriasis, atherosclerosis, rhinitis, autoimmunity and organ transplant rejection.

[0129] The methods of the invention contemplate use of a substance that modulates kinase activity in vitro, including kinase inhibitors.

[0130] The invention includes a method for detection of a kinase nucleic acid in a sample as a diagnostic tool for a disease or disorder, wherein said method comprises: contacting said sample with a nucleic acid probe which hybridizes under hybridization assay conditions to a nucleic acid target region of a nucleic acid sequence selected from the group consisting of those set forth in SEQ ID NO:1 through SEQ ID NO:114, said probe comprising the nucleic acid sequence, fragments thereof, or the complements of said sequences and fragments; and
[0131] detecting the presence or amount of the target region:probe hybrid, as an indication of said disease or disorder.

[0132] The invention further includes a method for detection of a kinase nucleic acid in a sample as a diagnostic tool for a disease or disorder, wherein said method comprises: contacting said sample with nucleic acid primers capable of hybridizing to a nucleic acid sequence selected from the group consisting of those set forth in SEQ ID NO:1 through SEQ ID NO:114; selectively amplifying at least a portion of a nucleic acid sequence selected from the group consisting of SEQ ID NO:1 through 114; and detecting the amplified DNA as an indication of said disease or disorder.

[0133] Such detection methods include a disease or disorder selected from the group consisting of cancers, immune-related diseases and disorders, cardiovascular disease, brain or neuronal-associated diseases, metabolic disorders and inflammatory disorders; a disease or disorder selected from the group consisting of cancers of tissues; cancers of blood or hematopoietic origin; cancers of the breast, colon, lung, prostate, cervix, brain, ovary, bladder or kidney; a disease or disorder is selected from the group consisting of central or peripheral nervious system disease, migraines, pain; sexual dysfunction; mood disorders; attention disorders; cognition disorders; hypotension; hypertension; psychotic disorders; neurological disorders and dyskinesias; a disease or disorder is selected from the group consisting of inflammatory disorders including rheumatoid arthritis, chronic inflammatory bowel disease, chronic inflammatory pelvic disease, multiple sclerosis, asthma, osteoarthritis, psoriasis, atherosclerosis, rhinitis, autoimmunity, and organ transplant rejection.

[0134] The invention includes an isolated, enriched or purified nucleic acid molecule that comprises a nucleic molecule encoding a domain of a kinase polypeptide having a sequence of SEQ ID NO:115-228.

[0135] The invention includes an isolated, enriched or purified nucleic acid molecule encoding a kinase polypeptide which comprises a nucleotide sequence that encodes a polypeptide having an amino acid sequence that has at least 90% identity to a polypeptide set forth in SEQ ID NO:115-228.

[0136] The invention includes an isolated, enriched or purified nucleic acid molecule according wherein the molecule comprises a nucleotide sequence substantially identical to a sequence of SEQ ID NO:1-114.

[0137] The invention includes an isolated, enriched or purified nucleic acid molecule consisting essentially of about 10-30 contiguous nucleotide bases of a nucleic acid sequence that encodes a polypeptide selected from the group consisting of SEQ ID NO:115 through SEQ ID NO:228. The invention also includes an isolated, enriched or purified nucleic acid molecule of about 10-30 contiguous nucleotide bases of a nucleic acid sequence that encodes a polypeptide selected from the group consisting of SEQ ID NO:115 through SEQ ID NO:228, consisting essentially of about 10-30 contiguous nucleotide bases of a nucleic acid sequence selected from the group consisting of SEQ ID NO:1 through 114.

[0138] The term “complement” refers to two nucleotides that can form multiple favorable interactions with one another. For example, adenine is complementary to thymine as they can form two hydrogen bonds. Similarly, guanine and cytosine are complementary since they can form three hydrogen bonds. A nucleotide sequence is the complement of another nucleotide sequence if all of the nucleotides of the first sequence are complementary to all of the nucleotides of the second sequence.

[0139] Various low or high stringency hybridization conditions may be used depending upon the specificity and selectivity desired. These conditions are well known to those skilled in the art. Under stringent hybridization conditions only highly complementary nucleic acid sequences hybridize. Preferably, such conditions prevent hybridization of nucleic acids having more than 1 or 2 mismatches out of 20 contiguous nucleotides, more preferably, such conditions prevent hybridization of nucleic acids having more than 1 or 2 mismatches out of 50 contiguous nucleotides, most preferably, such conditions prevent hybridization of nucleic acids having more than 1 or 2 mismatches out of 100 contiguous nucleotides. In some instances, the conditions may prevent hybridization of nucleic acids having more than 5 mismatches in the full-length sequence.

[0140] By stringent hybridization assay conditions is meant hybridization assay conditions at least as stringent as the following: hybridization in 50% formamide, 5×SSC, 50 mM NaH2PO4, pH 6.8, 0.5% SDS, 0.1 mg/mL sonicated salmon sperm DNA, and 5× Denhardt's solution at 42° C. overnight; washing with 2×SSC, 0.1% SDS at 45° C.; and washing with 0.2×SSC, 0.1% SDS at 45° C. Under some of the most stringent hybridization assay conditions, the second wash can be done with 0.1×SSC at a temperature up to 70° C. (Berger et al. (1987) Guide to Molecular Cloning Techniques pg 421, hereby incorporated by reference herein in its entirety including any figures, tables, or drawings.). However, other applications may require the use of conditions falling between these sets of conditions. Methods of determining the conditions required to achieve desired hybridizations are well known to those with ordinary skill in the art, and are based on several factors, including but not limited to, the sequences to be hybridized and the samples to be tested. Washing conditions of lower stringency frequently utilize a lower temperature during the washing steps, such as 65° C., 60° C., 55° C., 50° C., or 42° C.

[0141] The invention provides a method for identification of a nucleic acid encoding a kinas polypeptide in a sample comprising contacting the sample with a nucleic acid probe consisting essentially of 10-30 contiguous nucleotide bases of a nucleic acid sequence selected from the group consisting of SEQ ID NO:1 through 114, and isolating a nucleic acid that hybridizes to the probe.

[0142] In other preferred embodiments, the invention features isolated, enriched, or purified nucleic acid molecules encoding kinase polypeptides, further comprising a vector or promoter effective to initiate transcription in a host cell. The nucleic acid may encode a polypeptide of SEQ ID NO:115-228 and a vector or promoter effective to initiate transcription in a host cell. The invention includes such nucleic acid molecules that are isolated, enriched, or purified from a mammal and in a preferred embodiment, the mammal is a human. The invention also features recombinant nucleic acid, preferably in a cell or an organism. The recombinant nucleic acid may contain a sequence selected from the group consisting of those set forth in SEQ ID NO:1 through SEQ ID NO:114, or a functional derivative thereof and a vector or a promoter effective to initiate transcription in a host cell. The recombinant nucleic acid can alternatively contain a transcriptional initiation region functional in a cell, a sequence complementary to an RNA sequence encoding a kinase polypeptide and a transcriptional termination region functional in a cell. Specific vectors and host cell combinations are discussed herein.

[0143] The term “vector” relates to a single or double-stranded circular nucleic acid molecule that can be transfected into cells and replicated within or independently of a cell genome. A circular double-stranded nucleic acid molecule can be cut and thereby linearized upon treatment with restriction enzymes. An assortment of nucleic acid vectors, restriction enzymes, and the knowledge of the nucleotide sequences cut by restriction enzymes are readily available to those skilled in the art. A nucleic acid molecule encoding a kinase can be inserted into a vector by cutting the vector with restriction enzymes and ligating the two pieces together.

[0144] The term “transfecting” defines a number of methods to insert a nucleic acid vector or other nucleic acid molecules into a cellular organism. These methods involve a variety of techniques, such as treating the cells with high concentrations of salt, an electric field, detergent, or DMSO to render the outer membrane or wall of the cells permeable to nucleic acid molecules of interest or use of various viral transduction strategies.

[0145] The term “promoter” as used herein, refers to nucleic acid sequence needed for gene sequence expression. Promoter regions vary from organism to organism, but are well known to persons skilled in the art for different organisms. For example, in prokaryotes, the promoter region contains both the promoter (which directs the initiation of RNA transcription) as well as the DNA sequences which, when transcribed into RNA, will signal synthesis initiation. Such regions will normally include those 5′-non-coding sequences involved with initiation of transcription and translation, such as the TATA box, capping sequence, CAAT sequence, and the like.

[0146] In preferred embodiments, the isolated nucleic acid comprises, consists essentially of, or consists of a nucleic acid sequence selected from the group consisting of those set forth in SEQ ID NO:1 through SEQ ID NO:114, which encodes an amino acid sequence selected from the group consisting of those set forth in SEQ ID NO:115 through SEQ ID NO:228, a functional derivative thereof, or at least 35, 40, 45, 50, 60, 75, 100, 200, or 300 contiguous amino acids selected from the group consisting of those set forth in SEQ ID NO:115 through SEQ ID NO:228, the catalytic region of SEQ ID NO:115-228 or catalytic domains, functional domains, or spacer regions of SEQ ID NO:115 through SEQ ID NO:228. The nucleic acid may be isolated from a natural source by cDNA cloning or by subtractive hybridization. The natural source may be mammalian, preferably human, preferably blood, semen or tissue, and the nucleic acid may be synthesized by the triester method or by using an automated DNA synthesizer.

[0147] The term “mammal” refers preferably to such organisms as mice, rats, rabbits, guinea pigs, sheep, and goats, more preferably to cats, dogs, monkeys, and apes, and most preferably to humans.

[0148] In yet other preferred embodiments, the nucleic acid is a conserved or unique region, for example those useful for: the design of hybridization probes to facilitate identification and cloning of additional polypeptides, the design of PCR probes to facilitate cloning of additional polypeptides, obtaining antibodies to polypeptide regions, and designing antisense oligonucleotides.

[0149] By “conserved nucleic acid regions”, are meant regions present on two or more nucleic acids encoding a kinase polypeptide, to which a particular nucleic acid sequence can hybridize under lower stringency conditions. Examples of lower stringency conditions suitable for screening for nucleic acid encoding kinase polypeptides are provided in Wahl et al. Meth. Enzym. 152:399-407 (1987) and in Wahl et al. Meth. Enzym. 152:415-423 (1987), which are hereby incorporated by reference herein in its entirety, including any drawings, figures, or tables. Preferably, conserved regions differ by no more than 5 out of 20 nucleotides, even more preferably 2 out of 20 nucleotides or most preferably 1 out of 20 nucleotides.

[0150] By “unique nucleic acid region” is meant a sequence present in a nucleic acid coding for a kinase polypeptide that is not present in a sequence coding for any other naturally occurring polypeptide. Such regions preferably encode 32 (preferably 40, more preferably 45, most preferably 55) or more contiguous amino acids, for example, an amino acid sequence selected from the group consisting of those set forth in SEQ ID NO:115 through SEQ ID NO:228. In particular, a unique nucleic acid region is preferably of mammalian origin.

[0151] Another aspect of the invention features a nucleic acid probe for the detection of nucleic acid encoding a kinase polypeptide having an amino acid sequence selected from the group consisting of those set forth in SEQ ID NO:115 through SEQ ID NO:228, catalytic domains, functional domains, or spacer regions of SEQ ID NO:115 through SEQ ID NO:228, in a sample. The nucleic acid probe contains a nucleotide base sequence that will hybridize to the sequence selected from the group consisting of those set forth in SEQ ID NO:1 through SEQ ID NO:114, a sequence encoding catalytic domains, functional domains, or spacer regions of SEQ ID NO:115 through SEQ ID NO:228, or a functional derivative thereof.

[0152] In preferred embodiments, the nucleic acid probe hybridizes to nucleic acid encoding at least 12, 32, 75, 90, 105, 120, 150, 200, 250, 300 or 350 contiguous amino acids, wherein the nucleic acid sequence is selected from the group consisting of SEQ ID NO:1 through SEQ ID NO:114, or a functional derivative thereof.

[0153] Methods for using the probes include detecting the presence or amount of kinase RNA in a sample by contacting the sample with a nucleic acid probe under conditions such that hybridization occurs and detecting the presence or amount of the probe bound to kinase RNA. The nucleic acid duplex formed between the probe and a nucleic acid sequence coding for a kinase polypeptide may be used in the identification of the sequence of the nucleic acid detected (Nelson et al., in Nonisotopic DNA Probe Techniques, Academic Press, San Diego, Kricka, ed., p. 275, 1992, hereby incorporated by reference herein in its entirety, including any drawings, figures, or tables). Kits for performing such methods may be constructed to include a container means having disposed therein a nucleic acid probe.

[0154] Methods for using the probes also include using these probes to find, for example, the full-length clone of each of the predicted kinases by techniques known to one skilled in the art. These clones will be useful for screening for small molecule compounds that inhibit the catalytic activity of the encoded kinase with potential utility in treating cancers, immune-related diseases and disorders, cardiovascular disease, brain or neuronal-associated diseases, and metabolic disorders. More specifically disorders including cancers of tissues or blood, or hematopoietic origin, particularly those involving breast, colon, lung, prostate, cervix, skin, brain, ovary, bladder, or kidney; central or peripheral nervous system diseases and conditions including migraine, pain, sexual dysfunction, mood disorders, attention disorders, cognition disorders, hypotension, and hypertension; psychotic and neurological disorders, including anxiety, schizophrenia, manic depression, delirium, dementia, severe mental retardation and dyskinesias, such as Huntington's disease or Tourette's Syndrome; neurodegenerative diseases including Alzheimer's, Parkinson's, multiple sclerosis, and amyotrophic lateral sclerosis; viral or non-viral infections caused by HIV-1, HIV-2 or other viral- or prion-agents or fungal- or bacterial-organisms; metabolic disorders including Diabetes and obesity and their related syndromes, among others; cardiovascular disorders including reperfusion restenosis, hypertension, coronary thrombosis, clotting disorders, unregulated cell growth disorders, atherosclerosis; ocular disease including glaucoma, retinopathy, and macular degeneration; inflammatory disorders including rheumatoid arthritis, chronic inflammatory bowel disease, chronic inflammatory pelvic disease, multiple sclerosis, asthma, osteoarthritis, bone disorder, psoriasis, atherosclerosis, rhinitis, autoimmunity, and organ transplant rejection.

[0155] In another aspect, the invention describes a recombinant cell or tissue comprising a nucleic acid molecule encoding a kinase polypeptide having an amino acid sequence selected from the group consisting of those set forth in SEQ ID NO:115 through SEQ ID NO:228. In such cells, the nucleic acid may be under the control of the genomic regulatory elements, or may be under the control of exogenous regulatory elements including an exogenous promoter. By “exogenous” it is meant a promoter that is not normally coupled in vivo transcriptionally to the coding sequence for the kinase polypeptides.

[0156] The polypeptide is preferably a fragment of the protein encoded by an amino acid sequence selected from the group consisting of those set forth in SEQ ID NO:115 through SEQ ID NO:228. By “fragment,” is meant an amino acid sequence present in a kinase polypeptide. Preferably, such a sequence comprises at least 32, 45, 50, 60, 100, 200, or 300 contiguous amino acids of a sequence selected from the group consisting of those set forth in SEQ ID NO:115 through SEQ ID NO:228.

[0157] In another aspect, the invention features an isolated, enriched, or purified kinase polypeptide having the amino acid sequence selected from the group consisting of those set forth in SEQ ID NO:115 through SEQ ID NO:228.

[0158] By “isolated” in reference to a polypeptide is meant a polymer of 6 (preferably 12, more preferably 18, or 21, most preferably 25, 32, 40, or 50) or more amino acids conjugated to each other, including polypeptides that are isolated from a natural source or that are synthesized. In certain aspects longer polypeptides are preferred, such as those comprising 100, 200, 300, 400, 450, 500, 550, 600, 700, 800, 900 or more contiguous amino acids, including an amino acid sequence selected from the group consisting of those set forth in SEQ ID NO:115 through SEQ ID NO:228; other longer polypeptides also preferred are those having sequence that is substantially similar to a sequence selected from the group consisting of those set forth in SEQ ID NO:115 through SEQ ID NO:228(which preferably has at least 70%, 80%, 85%, 90%, 91%, 92%, 93%, 94%, 95%, 96%, 97%, 98%, 99% or 100% identity to the sequence).

[0159] The isolated polypeptides of the present invention are unique in the sense that they are not found in a pure or separated state in nature. Use of the term “isolated” indicates that a naturally occurring sequence has been removed from its normal cellular environment. Thus, the sequence may be in a cell-free solution or placed in a different cellular environment. The term does not imply that the sequence is the only amino acid chain present, but that it is essentially free (about 90-95% pure at least) of non-amino acid-based material naturally associated with it.

[0160] By the use of the term “enriched” in reference to a polypeptide is meant that the specific amino acid sequence constitutes a significantly higher fraction (2- to 5-fold) of the total amino acid sequences present in the cells or solution of interest than in normal or diseased cells or in the cells from which the sequence was taken. This could be caused by a person by preferential reduction in the amount of other amino acid sequences present, or by a preferential increase in the amount of the specific amino acid sequence of interest, or by a combination of the two. However, it should be noted that enriched does not imply that there are no other amino acid sequences present, just that the relative amount of the sequence of interest has been significantly increased. The term “significantly” here is used to indicate that the level of increase is useful to the person making such an increase, and generally means an increase relative to other amino acid sequences of about at least 2-fold, more preferably at least 5- to 10-fold or even more. The term also does not imply that there is no amino acid sequence from other sources. The other source of amino acid sequences may, for example, comprise amino acid sequence encoded by a yeast or bacterial genome, or a cloning vector such as pUC19. The term is meant to cover only those situations in which man has intervened to increase the proportion of the desired amino acid sequence.

[0161] It is also advantageous for some purposes that an amino acid sequence be in purified form. The term “purified” in reference to a polypeptide does not require absolute purity (such as a homogeneous preparation); instead, it represents an indication that the sequence is relatively purer than in the natural environment. Compared to the natural level this level should be at least 2-to 5-fold greater (e.g., in terms of mg/mL). Purification of at least one order of magnitude, preferably two or three orders, and more preferably four or five orders of magnitude is expressly contemplated. The substance is preferably free of contamination at a functionally significant level, for example 90%, 95%, or 99% pure.

[0162] In preferred embodiments, the kinase polypeptide is a fragment of the protein encoded by an amino acid sequence selected from the group consisting of those set forth in SEQ ID NO:115 through SEQ ID NO:228. Preferably, the kinase polypeptide contains at least 32, 45, 50, 60, 100, 200, or 300 contiguous amino acids of a sequence selected from the group consisting of those set forth in SEQ ID NO:3 and 4, or a functional derivative thereof.

[0163] In preferred embodiments, the kinase polypeptide comprises an amino acid sequence having (a) an amino acid sequence selected from the group consisting of those set forth in SEQ ID NO:115 through SEQ ID NO:228; and (b) an amino acid sequence selected from the group consisting of those set forth in SEQ ID NO:115 through SEQ ID NO:228, except that it lacks one or more of the domains selected from the group consisting of the catalytic domain, the C-terminal region, the N-terminal region, and the spacer region.

[0164] The polypeptide can be isolated from a natural source by methods well-known in the art. The natural source may be mammalian, preferably human, preferably blood, semen or tissue, and the polypeptide may be synthesized using an automated polypeptide synthesizer.

[0165] In some embodiments the invention includes a recombinant kinase polypeptide having (a) an amino acid sequence selected from the group consisting of those set forth in SEQ ID NO:115 through SEQ ID NO:228. By “recombinant kinase polypeptide” is meant a polypeptide produced by recombinant DNA techniques such that it is distinct from a naturally occurring polypeptide either in its location (e.g., present in a different cell or tissue than found in nature), purity or structure. Generally, such a recombinant polypeptide will be present in a cell in an amount different from that normally observed in nature.

[0166] The polypeptides to be expressed in host cells may also be fusion proteins which include regions from heterologous proteins. Such regions may be included to allow, e.g., secretion, improved stability, or facilitated purification of the polypeptide. For example, a sequence encoding an appropriate signal peptide can be incorporated into expression vectors. A DNA sequence for a signal peptide (secretory leader) may be fused in-frame to the polynucleotide sequence so that the polypeptide is translated as a fusion protein comprising the signal peptide. A signal peptide that is functional in the intended host cell promotes extracellular secretion of the polypeptide. Preferably, the signal sequence will be cleaved from the polypeptide upon secretion of the polypeptide from the cell. Thus, preferred fusion proteins can be produced in which the N-terminus of a kinase polypeptide is fused to a carrier peptide.

[0167] In one embodiment, the polypeptide comprises a fusion protein which includes a heterologous region used to facilitate purification of the polypeptide. Many of the available peptides used for such a function allow selective binding of the fusion protein to a binding partner. A preferred binding partner includes one or more of the IgG binding domains of protein A are easily purified to homogeneity by affinity chromatography on, for example, IgG-coupled Sepharose. Alternatively, many vectors have the advantage of carrying a stretch of histidine residues that can be expressed at the N-terminal or C-terminal end of the target protein, and thus the protein of interest can be recovered by metal chelation chromatography. A nucleotide sequence encoding a recognition site for a proteolytic enzyme such as enterokinase, factor X procollagenase or thrombine may immediately precede the sequence for a kinase polypeptide to permit cleavage of the fusion protein to obtain the mature kinase polypeptide. Additional examples of fusion-protein binding partners include, but are not limited to, the yeast I-factor, the honeybee melatin leader in sf9 insect cells, 6-His tag, thioredoxin tag, hemaglutinin tag, GST tag, and OmpA signal sequence tag. As will be understood by one of skill in the art, the binding partner which recognizes and binds to the peptide may be any ion, molecule or compound including metal ions (e.g., metal affinity columns), antibodies, or fragments thereof, and any protein or peptide which binds the peptide, such as the FLAG tag.

[0168] In another aspect, the invention features an antibody (e.g., a monoclonal or polyclonal antibody) having specific binding affinity to a kinase polypeptide or a kinase polypeptide domain or fragment where the polypeptide is selected from the group having a sequence at least about 90%, 91%, 92%, 93%, 94%, 95%, 96%, 97%, 98%, 99% or 100% identical to an amino acid sequence set forth in SEQ ID NO:115 through SEQ ID NO:228. By “specific binding affinity” is meant that the antibody binds to the target kinase polypeptide with greater affinity than it binds to other polypeptides under specified conditions. Antibodies or antibody fragments are polypeptides that contain regions that can bind other polypeptides. Antibodies can be used to identify an endogenous source of kinase polypeptides, to monitor cell cycle regulation, and for immuno-localization of kinase polypeptides within the cell.

[0169] The term “polyclonal” refers to antibodies that are heterogenous populations of antibody molecules derived from the sera of animals immunized with an antigen or an antigenic functional derivative thereof. For the production of polyclonal antibodies, various host animals may be immunized by injection with the antigen. Various adjuvants may be used to increase the immunological response, depending on the host species.

[0170] “Monoclonal antibodies” are substantially homogenous populations of antibodies to a particular antigen. They may be obtained by any technique which provides for the production of antibody molecules by continuous cell lines in culture. Monoclonal antibodies may be obtained by methods known to those skilled in the art (Kohler et al., Nature 256:495-497, 1975, and U.S. Pat. No. 4,376,110, both of which are hereby incorporated by reference herein in their entirety including any figures, tables, or drawings).

[0171] An antibody of the present invention includes “humanized” monoclonal and polyclonal antibodies. Humanized antibodies are recombinant proteins in which non-human (typically murine) complementarity determining regions of an antibody have been transferred from heavy and light variable chains of the non-human (e.g. murine) immunoglobulin into a human variable domain, followed by the replacement of some human residues in the framework regions of their murine counterparts. Humanized antibodies in accordance with this invention are suitable for use in therapeutic methods. General techniques for cloning murine immunoglobulin variable domains are described, for example, by the publication of Orlandi et al., Proc. Nat'l Acad. Sci. USA 86: 3833 (1989). Techniques for producing humanized monoclonal antibodies are described, for example, by Jones et al., Nature 321:522 (1986), Riechmann et al., Nature 332:323 (1988), Verhoeyen et al., Science 239:1534 (1988), Carter et al., Proc. Nat'l Acad. Sci. USA 89:4285 (1992), Sandhu, Crit. Rev. Biotech. 12:437 (1992), and Singer et al., J. Immun. 150:2844 (1993).

[0172] The term “antibody fragment” refers to a portion of an antibody, often the hypervariable region and portions of the surrounding heavy and light chains, that displays specific binding affinity for a particular molecule. A hypervariable region is a portion of an antibody that physically binds to the polypeptide target.

[0173] An antibody fragment of the present invention includes a “single-chain antibody,” a phrase used in this description to denote a linear polypeptide that binds antigen with specificity and that comprises variable or hypervariable regions from the heavy and light chains of an antibody. Such single chain antibodies can be produced by conventional methodology. The Vh and Vl regions of the Fv fragment can be covalently joined and stabilized by the insertion of a disulfide bond. See Glockshuber, et al., Biochemistry 1362 (1990). Alternatively, the Vh and Vl regions can be joined by the insertion of a peptide linker. A gene encoding the Vh, Vl and peptide linker sequences can be constructed and expressed using a recombinant expression vector. See Colcher, et al., J. Nat'l Cancer Inst. 82: 1191 (1990). Amino acid sequences comprising hypervariable regions from the Vh and Vl antibody chains can also be constructed using disulfide bonds or peptide linkers.

[0174] Antibodies or antibody fragments having specific binding affinity to a polypeptide of the invention may be used in methods for detecting the presence and/or amount of kinase polypeptide in a sample by probing the sample with the antibody under conditions suitable for kinase antibody immunocomplex formation and detecting the presence and/or amount of the antibody conjugated to the kinase polypeptide. Diagnostic kits for performing such methods may be constructed to include antibodies or antibody fragments specific for the kinase as well as a conjugate of a binding partner of the antibodies or the antibodies themselves.

[0175] An antibody or antibody fragment with specific binding affinity to a kinase polypeptide of the invention can be isolated, enriched, or purified from a prokaryotic or eukaryotic organism. Routine methods known to those skilled in the art enable production of antibodies or antibody fragments, in both prokaryotic and eukaryotic organisms. Purification, enrichment, and isolation of antibodies, which are polypeptide molecules, are described above. The antibody may be directly labelled with a fluorescent or radioactive label.

[0176] Antibodies having specific binding affinity to a kinase polypeptide of the invention may be used in methods for detecting the presence and/or amount of kinase polypeptide in a sample by contacting the sample with the antibody under conditions such that an immunocomplex forms and detecting the presence and/or amount of the antibody conjugated to the kinase polypeptide. Diagnostic kits for performing such methods may be constructed to include a first container containing the antibody and a second container having a conjugate of a binding partner of the antibody and a label, such as, for example, a radioisotope or fluorescent label. The diagnostic kit may also include notification of an FDA approved use and instructions therefor. Antibodies may identify phosphorylated regions of a kinase polypeptide when a protein is phosphorylated.

[0177] In another aspect, the invention features a hybridoma which produces an antibody having specific binding affinity to a kinase polypeptide or a kinase polypeptide domain, where the polypeptide is selected from the group having an amino acid sequence set forth in SEQ ID NO:115 through SEQ ID NO:228. By hybridoma is meant an immortalized cell line that is capable of secreting an antibody, for example an antibody to a kinase of the invention. In preferred embodiments, the antibody to the kinase comprises a sequence of amino acids that is able to specifically bind a kinase polypeptide of the invention.

[0178] In another aspect, the present invention is also directed to kits comprising antibodies that bind to a polypeptide encoded by any of the nucleic acid molecules described above, and a negative control antibody.

[0179] The term “negative control antibody” refers to an antibody derived from similar source as the antibody having specific binding affinity, but where it displays no binding affinity to a polypeptide of the invention.

[0180] In another aspect, the invention features a kinase polypeptide binding agent able to bind to a kinase polypeptide selected from the group having (a) an amino acid sequence selected from the group consisting of those set forth in SEQ ID NO:115 through SEQ ID NO:228. The binding agent is preferably a purified antibody that recognizes an epitope present on a kinase polypeptide of the invention. Other binding agents include molecules that bind to kinase polypeptides and analogous molecules that bind to a kinase polypeptide. Such binding agents may be identified by using assays that measure kinase binding partner activity, such as those that measure PDGFR activity.

[0181] The invention also features a method for screening for human cells containing a kinase polypeptide of the invention or an equivalent sequence. The method involves identifying the novel polypeptide in human cells using techniques that are routine and standard in the art, such as those described herein for identifying the kinases of the invention (e.g., cloning, Southern or Northern blot analysis, in situ hybridization, PCR amplification, etc.).

[0182] In another aspect, the invention features methods for identifying a substance that modulates kinase activity comprising the steps of: (a) contacting a kinase polypeptide selected from the group having an amino acid sequence selected from the group consisting of those set forth in SEQ ID NO:115 through SEQ ID NO:228 with a test substance; (b) measuring the activity of said polypeptide; and (c) determining whether said substance modulates the activity of said polypeptide. The skilled artisan will appreciate that the kinase polypeptides of the invention, including, for example, a portion of a full-length sequence such as a catalytic domain or a portion thereof, are useful for the identification of a substance which modulates kinase activity. Those kinase polypeptides having a functional activity (e.g., catalytic activity as defined herein) are useful for identifying a substance that modulates kinase activity.

[0183] The term “modulates” refers to the ability of a compound to alter the function of a kinase of the invention. A modulator preferably activates or inhibits the activity of a kinase of the invention depending on the concentration of the compound (modulator) exposed to the kinase.

[0184] The term “modulates” also refers to altering the function of kinases of the invention by increasing or decreasing the probability that a complex forms between the kinase and a natural binding partner. A modulator preferably increases the probability that such a complex forms between the kinase and the natural binding partner, more preferably increases or decreases the probability that a complex forms between the kinase and the natural binding partner depending on the concentration of the compound (modulator) exposed to the kinase, and most preferably decreases the probability that a complex forms between the kinase and the natural binding partner.

[0185] The term “activates” refers to increasing the cellular activity of the kinase. The term inhibit refers to decreasing the cellular activity of the kinase. Kinase activity is the phosphorylation of a substrate or the binding with a natural binding partner.

[0186] The term “complex” refers to an assembly of at least two molecules bound to one another. Signal transduction complexes often contain at least two protein molecules bound to one another. For instance, a tyrosine receptor protein kinase, GRB2, SOS, RAF, and RAS assemble to form a signal transduction complex in response to a mitogenic ligand.

[0187] The term “natural binding partner” refers to polypeptides, lipids, small molecules, or nucleic acids that bind to kinases in cells. A change in the interaction between a kinase and a natural binding partner can manifest itself as an increased or decreased probability that the interaction forms, or an increased or decreased concentration of kinase/natural binding partner complex.

[0188] The term “contacting” as used herein refers to mixing a solution comprising the test compound with a liquid medium bathing the cells of the methods. The solution comprising the compound may also comprise another component, such as dimethyl sulfoxide (DMSO), which facilitates the uptake of the test compound or compounds into the cells of the methods. The solution comprising the test compound may be added to the medium bathing the cells by utilizing a delivery apparatus, such as a pipette-based device or syringe-based device.

[0189] In another aspect, the invention features methods for identifying a substance that modulates kinase activity in a cell comprising the steps of: (a) expressing a kinase polypeptide in a cell, wherein said polypeptide is selected from the group having an amino acid sequence selected from the group consisting of those set forth in SEQ ID NO:115 through SEQ ID NO:228; (b) adding a test substance to said cell; and (c) monitoring a change in kinase activity or a change in cell phenotype or the interaction between said polypeptide and a natural binding partner. The skilled artisan will appreciate that the kinase polypeptides of the invention, including, for example, a portion of a full-length sequence such as a catalytic domain or a portion thereof, and are useful for the identification of a substance which modulates kinase activity. Those kinase polypeptides having a functional activity (e.g., catalytic activity as defined herein) are useful for identifying a substance that modulates kinase activity.

[0190] The term “expressing” as used herein refers to the production of kinases of the invention from a nucleic acid vector containing kinase genes within a cell. The nucleic acid vector is transfected into cells using well known techniques in the art as described herein.

[0191] Another aspect of the instant invention is directed to methods of identifying compounds that bind to kinase polypeptides of the present invention, comprising contacting the kinase polypeptides with a compound, and determining whether the compound binds the kinase polypeptides. Binding can be determined by binding assays which are well known to the skilled artisan, including, but not limited to, gel-shift assays, Western blots, radiolabeled competition assay, phage-based expression cloning, co-fractionation by chromatography, co-precipitation, cross linking, interaction trap/two-hybrid analysis, southwestern analysis, ELISA, and the like, which are described in, for example, Current Protocols in Molecular Biology, 1999, John Wiley & Sons, NY, which is incorporated herein by reference in its entirety. The compounds to be screened include, but are not limited to, compounds of extracellular, intracellular, biological or chemical origin.

[0192] The methods of the invention also embrace compounds that are attached to a label, such as a radiolabel (e.g., ¹²⁵I, ³⁵S, ³²P, ³³P, ³H), a fluorescence label, a chemiluminescent label, an enzymic label and an immunogenic label. The kinase polypeptides employed in such a test may either be free in solution, attached to a solid support, borne on a cell surface, located intracellularly or associated with a portion of a cell. One skilled in the art can, for example, measure the formation of complexes between a kinase polypeptide and the compound being tested. Alternatively, one skilled in the art can examine the diminution in complex formation between a kinase polypeptide and its substrate caused by the compound being tested.

[0193] Other assays can be used to examine enzymatic activity including, but not limited to, photometric, radiometric, HPLC, electrochemical, and the like, which are described in, for example, Enzyme Assays: A Practical Approach, eds. R. Eisenthal and M. J. Danson, 1992, Oxford University Press, which is incorporated herein by reference in its entirety.

[0194] Another aspect of the present invention is directed to methods of identifying compounds which modulate (i.e., increase or decrease) activity of a kinase polypeptide comprising contacting the kinase polypeptide with a compound, and determining whether the compound modifies activity of the kinase polypeptide. As described herein, the kinase polypeptides of the invention include a portion of a full-length sequence, such as a catalytic domain, as defined herein. In some instances, the kinase polypeptides of the invention comprise less than the entire catalytic domain, yet exhibit kinase or kinase-like activity. These compounds are also referred to as “modulators of protein kinases.” The activity in the presence of the test compound is compared to the activity in the absence of the test compound. Where the activity of a sample containing the test compound is higher than the activity in a sample lacking the test compound, the compound will have increased the activity. Similarly, where the activity of a sample containing the test compound is lower than the activity in the sample lacking the test compound, the compound will have inhibited the activity.

[0195] The present invention is particularly useful for screening compounds by using a kinase polypeptide in any of a variety of drug screening techniques. The compounds to be screened include, but are not limited to, extracellular, intracellular, biological or chemical origin. The kinase polypeptide employed in such a test may be in any form, preferably, free in solution, attached to a solid support, borne on a cell surface or located intracellularly. One skilled in the art can, for example, measure the formation of complexes between a kinase polypeptide and the compound being tested. Alternatively, one skilled in the art can examine the diminution in complex formation between a kinase polypeptide and its substrate caused by the compound being tested.

[0196] The activity of kinase polypeptides of the invention can be determined by, for example, examining the ability to bind or be activated by chemically synthesised peptide ligands. Alternatively, the activity of the kinase polypeptides can be assayed by examining their ability to bind metal ions such as calcium, hormones, chemokines, neuropeptides, neurotransmitters, nucleotides, lipids, and odorants. Thus, modulators of the kinase polypeptide's activity may alter a kinase function, such as a binding property of a kinase or an activity such as signal transduction or membrane localization.

[0197] In various embodiments of the method, the assay may take the form of a yeast growth assay, an Aequorin assay, a Luciferase assay, a mitogenesis assay, a MAP Kinase activity assay, as well as other binding or function-based assays of kinase activity that are generally known in the art. In several of these embodiments, the invention includes any of the receptor and non-receptor protein tyrosine kinases, receptor and non-receptor protein phosphatases, polypeptides containing SRC homology 2 and 3 domains, phosphotyrosine binding proteins (SRC homology 2 (SH2) and phosphotyrosine binding (PTB and PH) domain containing proteins), proline-rich binding proteins (SH3 domain containing proteins), GTPases, phosphodiesterases, phospholipases, prolyl isomerases, proteases, Ca2+ binding proteins, cAMP binding proteins, guanyl cyclases, adenylyl cyclases, NO generating proteins, nucleotide exchange factors, and transcription factors. Biological activities of kinases according to the invention include, but are not limited to, the binding of a natural or a synthetic ligand, as well as any one of the functional activities of kinases known in the art. Non-limiting examples of kinase activities include transmembrane signaling of various forms, which may involve kinase binding interactions and/or the exertion of an influence over signal transduction.

[0198] The modulators of the invention exhibit a variety of chemical structures, which can be generally grouped into mimetics of natural kinase ligands, and peptide and non-peptide allosteric effectors of kinases. The invention does not restrict the sources for suitable modulators, which may be obtained from natural sources such as plant, animal or mineral extracts, or non-natural sources such as small molecule libraries, including the products of combinatorial chemical approaches to library construction, and peptide libraries.

[0199] The use of cDNAs encoding kinases in drug discovery programs is well-known; assays capable of testing thousands of unknown compounds per day in high-throughput screens (HTSs) are thoroughly documented. The literature is replete with examples of the use of radiolabelled ligands in HTS binding assays for drug discovery (see Williams, Medicinal Research Reviews, 1991, 11, 147-184.; Sweetnam, et al., J. Natural Products, 1993, 56, 441-455 for review). Recombinant proteins are preferred for binding assay HTS because they allow for better specificity (higher relative purity), provide the ability to generate large amounts of material, and can be used in a broad variety of formats (see Hodgson, Bio/Technology, 1992, 10, 973-980; each of which is incorporated herein by reference in its entirety).

[0200] A variety of heterologous systems is available for functional expression of recombinant proteins that are well known to those skilled in the art. Such systems include bacteria (Strosberg, et al., Trends in Pharmacological Sciences, 1992, 13, 95-98), yeast (Pausch, Trends in Biotechnology, 1997, 15, 487-494), several kinds of insect cells (Vanden Broeck, Int. Rev. Cytology, 1996, 164, 189-268), amphibian cells (Jayawickreme et al., Current Opinion in Biotechnology, 1997, 8, 629-634) and several mammalian cell lines (CHO, HEK293, COS, etc.; see Gerhardt, et al., Eur. J. Pharmacology, 1997, 334, 1-23). These examples do not preclude the use of other possible cell expression systems, including cell lines obtained from nematodes (PCT application WO 98/37177).

[0201] An expressed kinase can be used for HTS binding assays in conjunction with its defined ligand, in this case the corresponding peptide that activates it. The identified peptide is labeled with a suitable radioisotope, including, but not limited to, 125I, ³H, ³⁵S or ³²P, by methods that are well known to those skilled in the art. Alternatively, the peptides may be labeled by well-known methods with a suitable fluorescent derivative (Baindur, et al., Drug Dev. Res., 1994, 33, 373-398; Rogers, Drug Discovery Today, 1997, 2, 156-160). Radioactive ligand specifically bound to the receptor in membrane preparations made from the cell line expressing the recombinant protein can be detected in HTS assays in one of several standard ways, including filtration of the receptor-ligand complex to separate bound ligand from unbound ligand (Williams, Med. Res. Rev., 1991, 11, 147-184.; Sweetnam, et al., J. Natural Products, 1993, 56, 441-455). Alternative methods include a scintillation proximity assay (SPA) or a FlashPlate format in which such separation is unnecessary (Nakayama, Cur. Opinion Drug Disc. Dev., 1998, 1, 85-91 Bossé, et al., J. Biomolecular Screening, 1998, 3, 285-292.). Binding of fluorescent ligands can be detected in various ways, including fluorescence energy transfer (FRET), direct spectrophotofluorometric analysis of bound ligand, or fluorescence polarization (Rogers, Drug Discovery Today, 1997, 2, 156-160; Hill, Cur. Opinion Drug Disc. Dev., 1998, 1, 92-97).

[0202] The kinases and natural binding partners required for functional expression of heterologous kinase polypeptides can be native constituents of the host cell or can be introduced through well-known recombinant technology. The kinase polypeptides can be intact or chimeric. The kinase activation results in the stimulation or inhibition of other native proteins, events that can be linked to a measurable response.

[0203] Examples of such biological responses include, but are not limited to, the following: the ability to survive in the absence of a limiting nutrient in specifically engineered yeast cells (Pausch, Trends in Biotechnology, 1997, 15, 487-494); changes in intracellular Ca²⁺ concentration as measured by fluorescent dyes (Murphy, et al., Cur. Opinion Drug Disc. Dev., 1998, 1, 192-199), cell cycle, apoptosis, and growth. Fluorescence changes can also be used to monitor ligand-induced changes in membrane potential or intracellular pH; an automated system suitable for HTS has been described for these purposes (Schroeder, et al., J. Biomolecular Screening, 1996, 1, 75-80).

[0204] The invention contemplates a multitude of assays to screen and identify inhibitors of ligand binding to kinase polypeptides. In one example, the kinase polypeptide is immobilized and interaction with a binding partner is assessed in the presence and absence of a candidate modulator such as an inhibitor compound. In another example, interaction between the kinase polypeptide and its binding partner is assessed in a solution assay, both in the presence and absence of a candidate inhibitor compound. In either assay, an inhibitor is identified as a compound that decreases binding between the kinase polypeptide and its natural binding partner. Another contemplated assay involves a variation of the di-hybrid assay wherein an inhibitor of protein/protein interactions is identified by detection of a positive signal in a transformed or transfected host cell, as described in PCT publication number WO 95/20652, published Aug. 3, 1995 and is included by reference herein including any figures, tables, or drawings.

[0205] Candidate modulators contemplated by the invention include compounds selected from libraries of either potential activators or potential inhibitors. There are a number of different libraries used for the identification of small molecule modulators, including: (1) chemical libraries, (2) natural product libraries, and (3) combinatorial libraries comprised of random peptides, oligonucleotides or organic molecules. Chemical libraries consist of random chemical structures, some of which are analogs of known compounds or analogs of compounds that have been identified as “hits” or “leads” in other drug discovery screens, while others are derived from natural products, and still others arise from non-directed synthetic organic chemistry. Natural product libraries are collections of microorganisms, animals, plants, or marine organisms which are used to create mixtures for screening by: (1) fermentation and extraction of broths from soil, plant or marine microorganisms or (2) extraction of plants or marine organisms. Natural product libraries include polyketides, non-ribosomal peptides, and variants (non-naturally occurring) thereof. For a review, see Science 282:63-68 (1998). Combinatorial libraries are composed of large numbers of peptides, oligonucleotides, or organic compounds as a mixture. These libraries are relatively easy to prepare by traditional automated synthesis methods, PCR, cloning, or proprietary synthetic methods. Of particular interest are non-peptide combinatorial libraries. Still other libraries of interest include peptide, protein, peptidomimetic, multiparallel synthetic collection, recombinatorial, and polypeptide libraries. For a review of combinatorial chemistry and libraries created therefrom, see Myers, Curr. Opin. Biotechnol. 8:701-707 (1997). Identification of modulators through use of the various libraries described herein permits modification of the candidate “hit” (or “lead”) to optimize the capacity of the “hit” to modulate activity.

[0206] Still other candidate inhibitors contemplated by the invention can be designed and include soluble forms of binding partners, as well as such binding partners as chimeric, or fusion, proteins. A “binding partner” as used herein broadly encompasses both natural binding partners as described above as well as chimeric polypeptides, peptide modulators other than natural ligands, antibodies, antibody fragments, and modified compounds comprising antibody domains that are immunospecific for the expression product of the identified kinase gene.

[0207] Other assays may be used to identify specific peptide ligands of a kinase polypeptide, including assays that identify ligands of the target protein through measuring direct binding of test ligands to the target protein, as well as assays that identify ligands of target proteins through affinity ultrafiltration with ion spray mass spectroscopy/HPLC methods or other physical and analytical methods. Alternatively, such binding interactions are evaluated indirectly using the yeast two-hybrid system described in Fields et al., Nature, 340:245-246 (1989), and Fields et al., Trends in Genetics, 10:286-292 (1994), both of which are incorporated herein by reference. The two-hybrid system is a genetic assay for detecting interactions between two proteins or polypeptides. It can be used to identify proteins that bind to a known protein of interest, or to delineate domains or residues critical for an interaction. Variations on this methodology have been developed to clone genes that encode DNA binding proteins, to identify peptides that bind to a protein, and to screen for drugs. The two-hybrid system exploits the ability of a pair of interacting proteins to bring a transcription activation domain into close proximity with a DNA binding domain that binds to an upstream activation sequence (UAS) of a reporter gene, and is generally performed in yeast. The assay requires the construction of two hybrid genes encoding (1) a DNA-binding domain that is fused to a first protein and (2) an activation domain fused to a second protein. The DNA-binding domain targets the first hybrid protein to the UAS of the reporter gene; however, because most proteins lack an activation domain, this DNA-binding hybrid protein does not activate transcription of the reporter gene. The second hybrid protein, which contains the activation domain, cannot by itself activate expression of the reporter gene because it does not bind the UAS. However, when both hybrid proteins are present, the noncovalent interaction of the first and second proteins tethers the activation domain to the UAS, activating transcription of the reporter gene. For example, when the first protein is a kinase gene product, or fragment thereof, that is known to interact with another protein or nucleic acid, this assay can be used to detect agents that interfere with the binding interaction. Expression of the reporter gene is monitored as different test agents are added to the system. The presence of an inhibitory agent results in lack of a reporter signal.

[0208] When the function of the kinase polypeptide gene product is unknown and no ligands are known to bind the gene product, the yeast two-hybrid assay can also be used to identify proteins that bind to the gene product. In an assay to identify proteins that bind to a kinase polypeptide, or fragment thereof, a fusion polynucleotide encoding both a kinase polypeptide (or fragment) and a UAS binding domain (i.e., a first protein) may be used. In addition, a large number of hybrid genes each encoding a different second protein fused to an activation domain are produced and screened in the assay. Typically, the second protein is encoded by one or more members of a total cDNA or genomic DNA fusion library, with each second protein coding region being fused to the activation domain. This system is applicable to a wide variety of proteins, and it is not even necessary to know the identity or function of the second binding protein. The system is highly sensitive and can detect interactions not revealed by other methods; even transient interactions may trigger transcription to produce a stable mRNA that can be repeatedly translated to yield the reporter protein.

[0209] Other assays may be used to search for agents that bind to the target protein. One such screening method to identify direct binding of test ligands to a target protein is described in U.S. Pat. No. 5,585,277, incorporated herein by reference. This method relies on the principle that proteins generally exist as a mixture of folded and unfolded states, and continually alternate between the two states. When a test ligand binds to the folded form of a target protein (i.e., when the test ligand is a ligand of the target protein), the target protein molecule bound by the ligand remains in its folded state. Thus, the folded target protein is present to a greater extent in the presence of a test ligand which binds the target protein, than in the absence of a ligand. Binding of the ligand to the target protein can be determined by any method which distinguishes between the folded and unfolded states of the target protein. The function of the target protein need not be known in order for this assay to be performed. Virtually any agent can be assessed by this method as a test ligand, including, but not limited to, metals, polypeptides, proteins, lipids, polysaccharides, polynucleotides and small organic molecules.

[0210] Another method for identifying ligands of a target protein is described in Wieboldt et al., Anal. Chem., 69:1683-1691 (1997), incorporated herein by reference. This technique screens combinatorial libraries of 20-30 agents at a time in solution phase for binding to the target protein. Agents that bind to the target protein are separated from other library components by simple membrane washing. The specifically selected molecules that are retained on the filter are subsequently liberated from the target protein and analyzed by HPLC and pneumatically assisted electrospray (ion spray) ionization mass spectroscopy. This procedure selects library components with the greatest affinity for the target protein, and is particularly useful for small molecule libraries.

[0211] In preferred embodiments of the invention, methods of screening for compounds which modulate kinase activity comprise contacting test compounds with kinase polypeptides and assaying for the presence of a complex between the compound and the kinase polypeptide. In such assays, the ligand is typically labelled. After suitable incubation, free ligand is separated from that present in bound form, and the amount of free or uncomplexed label is a measure of the ability of the particular compound to bind to the kinase polypeptide.

[0212] In another embodiment of the invention, high throughput screening for compounds having suitable binding affinity to kinase polypeptides is employed. Briefly, large numbers of different small peptide test compounds are synthesised on a solid substrate. The peptide test compounds are contacted with the kinase polypeptide and washed. Bound kinase polypeptide is then detected by methods well known in the art. Purified polypeptides of the invention can also be coated directly onto plates for use in the aforementioned drug screening techniques. In addition, non-neutralizing antibodies can be used to capture the protein and immobilize it on the solid support.

[0213] Other embodiments of the invention comprise using competitive screening assays in which neutralizing antibodies capable of binding a polypeptide of the invention specifically compete with a test compound for binding to the polypeptide. In this manner, the antibodies can be used to detect the presence of any peptide that shares one or more antigenic determinants with a kinase polypeptide. Radiolabeled competitive binding studies are described in A. H. Lin et al. Antimicrobial Agents and Chemotherapy, 1997, vol. 41, no. 10. pp. 2127-2131, the disclosure of which is incorporated herein by reference in its entirety.

[0214] In another aspect, the invention provides methods for treating a disease by administering to a patient in need of such treatment a substance that modulates the activity of a kinase polypeptide selected from the group consisting of those set forth in SEQ ID NO:115 through SEQ ID NO:228, as well as the full-length polypeptide thereof, or a portion of any of these sequences that retains functional activity, as described herein. Preferably the disease is selected from the group consisting of cancers, immune-elated diseases and disorders, cardiovascular disease, brain or neuronal-associated diseases, and metabolic disorders. More specifically these diseases include cancer of tissues, blood, or hematopoietic origin, particularly those involving breast, colon, lung, prostate, cervical, brain, ovarian, bladder, skin or kidney; central or peripheral nervous system diseases and conditions including migraine, pain, sexual dysfunction, mood disorders, attention disorders, cognition disorders, hypotension, and hypertension; psychotic and neurological disorders, including anxiety, schizophrenia, manic depression, delirium, dementia, severe mental retardation and dyskinesias, such as Huntington's disease or Tourette's Syndrome; neurodegenerative diseases including Alzheimer's, Parkinson's, Multiple sclerosis, and Amyotrophic lateral sclerosis; viral or non-viral infections caused by HIV-1, HIV-2 or other viral- or prion-agents or fungal- or bacterial-organisms; metabolic disorders including Diabetes and obesity and their related syndromes, among others; cardiovascular disorders including reperfusion restenosis, hypertension, coronary thrombosis, clotting disorders, unregulated cell growth disorders, atherosclerosis; ocular disease including glaucoma, retinopathy, and macular degeneration; inflammatory disorders including rheumatoid arthritis, chronic inflammatory bowel disease, chronic inflammatory pelvic disease, multiple sclerosis, asthma, osteoarthritis, bone disorders, psoriasis, atherosclerosis, rhinitis, autoimmunity, and organ transplant rejection.

[0215] In preferred embodiments, the invention provides methods for treating or preventing a disease or disorder by administering to a patient in need of such treatment a substance that modulates the activity of a kinase polypeptide having an amino acid sequence selected from the group consisting of those set forth in SEQ ID NO:115 through SEQ ID NO:228, as well as the full-length polypeptide thereof, or a portion of any of these sequences that retains functional activity, as described herein. Preferably, the disease is selected from the group consisting of cancers, immune-related diseases and disorders, cardiovascular disease, brain or neuronal-associated diseases, and metabolic disorders. More specifically these diseases include cancer of tissues, blood, or hematopoietic origin, particularly those involving breast, colon, lung, prostate, cervical, brain, ovarian, bladder, or kidney; central or peripheral nervous system diseases and conditions including migraine, pain, sexual dysfunction, mood disorders, attention disorders, cognition disorders, hypotension, and hypertension; psychotic and neurological disorders, including anxiety, schizophrenia, manic depression, delirium, dementia, severe mental retardation and dyskinesias, such as Huntington's disease or Tourette's Syndrome; neurodegenerative diseases including Alzheimer's, Parkinson's, Multiple sclerosis, and Amyotrophic lateral sclerosis; viral or non-viral infections caused by HIV-1, HIV-2 or other viral- or prion-agents or fungal- or bacterial-organisms; metabolic disorders including Diabetes and obesity and their related syndromes, among others; cardiovascular disorders including reperfusion restenosis, coronary thrombosis, clotting disorders, unregulated cell growth disorders, atherosclerosis; ocular disease including glaucoma, retinopathy, and macular degeneration; inflammatory disorders including rheumatoid arthritis, chronic inflammatory bowel disease, chronic inflammatory pelvic disease, multiple sclerosis, asthma, osteoarthritis, psoriasis, atherosclerosis, rhinitis, autoimmunity, and organ transplant rejection.

[0216] Substances useful for treatment of kinase-related disorders or diseases preferably show positive results in one or more in vitro assays for an activity corresponding to treatment of the disease or disorder in question (Examples of such assays are provided in the references in section VI, below; and in Example 7, herein). Examples of substances that can be screened for favorable activity are provided and referenced in section VI, below. The substances that modulate the activity of the kinases preferably include, but are not limited to, antisense oligonucleotides and inhibitors of protein kinases, as determined by methods and screens referenced in section VI and Example 7, below.

[0217] The term “preventing” refers to decreasing the probability that an organism contracts or develops an abnormal condition.

[0218] The term “treating” refers to having a therapeutic effect and at least partially alleviating or abrogating an abnormal condition in the organism.

[0219] The term “therapeutic effect” refers to the inhibition or activation factors causing or contributing to the abnormal condition. A therapeutic effect relieves to some extent one or more of the symptoms of the abnormal condition. In reference to the treatment of abnormal conditions, a therapeutic effect can refer to one or more of the following: (a) an decrease in the proliferation, growth, and/or differentiation of cells; (b) inhibition (i.e., slowing or stopping) of cell death; (c) inhibition of degeneration; (d) relieving to some extent one or more of the symptoms associated with the abnormal condition; and (e) enhancing the function of the affected population of cells. Compounds demonstrating efficacy against abnormal conditions can be identified as described herein.

[0220] The term “abnormal condition” refers to a function in the cells or tissues of an organism that deviates from their normal functions in that organism. An abnormal condition can relate to cell proliferation, cell differentiation, or cell survival.

[0221] Abnormal cell proliferative conditions include cancers such as fibrotic and mesangial disorders, abnormal angiogenesis and vasculogenesis, wound healing, psoriasis, diabetes mellitus, and inflammation.

[0222] Abnormal differentiation conditions include, but are not limited to neurodegenerative disorders, slow wound healing rates, and slow tissue grafting healing rates.

[0223] Abnormal cell survival conditions relate to conditions in which programmed cell death (apoptosis) pathways are activated or abrogated. A number of protein kinases are associated with the apoptosis pathways. Aberrations in the function of any one of the protein kinases could lead to cell immortality or premature cell death.

[0224] The term “aberration”, in conjunction with the function of a kinase in a signal transduction process, refers to a kinase that is over- or under-expressed in an organism, mutated such that its catalytic activity is lower or higher than wild-type protein kinase activity, mutated such that it can no longer interact with a natural binding partner, is no longer modified by another protein kinase or protein phosphatase, or no longer interacts with a natural binding partner.

[0225] The term “administering” relates to a method of incorporating a compound into cells or tissues of an organism. The abnormal condition can be prevented or treated when the cells or tissues of the organism exist within the organism or outside of the organism. Cells existing outside the organism can be maintained or grown in cell culture dishes. For cells harbored within the organism, many techniques exist in the art to administer compounds, including (but not limited to) oral, parenteral, dermal, injection, and aerosol applications. For cells outside of the organism, multiple techniques exist in the art to administer the compounds, including (but not limited to) cell microinjection techniques, transformation techniques, and carrier techniques.

[0226] The abnormal condition can also be prevented or treated by administering a compound to a group of cells having an aberration in a signal transduction pathway to an organism. The effect of administering a compound on organism function can then be monitored. The organism is preferably a mammal. The organism also is preferably a mouse, rat, rabbit, guinea pig, dog, cat, horse, pig, sheep, or goat, more preferably a monkey or ape, and most preferably a human.

[0227] In another aspect, the invention features methods for detection of a kinase polypeptide in a sample as a diagnostic tool for diseases or disorders, wherein the method comprises the steps of: (a) contacting the sample with a nucleic acid probe which hybridizes under hybridization assay conditions to a nucleic acid target region of of a nucleic acid sequence selected from the group consisting of SEQ ID NO:1 through 114, said probe comprising the nucleic acid sequence encoding the polypeptide, fragments thereof, and the complements of the sequences and fragments; and (b) detecting the presence or amount of the probe:target region hybrid as an indication of the disease.

[0228] In preferred embodiments of the invention, the disease or disorder is selected from the group consisting of Preferably the disease is selected from the group consisting of cancers, immune-elated diseases and disorders, cardiovascular disease, brain or neuronal-associated diseases, and metabolic disorders. More specifically these diseases include cancer of tissues, blood, or hematopoietic origin, particularly those involving breast, colon, lung, prostate, cervical, brain, ovarian, bladder, skin or kidney; central or peripheral nervous system diseases and conditions including migraine, pain, sexual dysfunction, mood disorders, attention disorders, cognition disorders, hypotension, and hypertension; psychotic and neurological disorders, including anxiety, schizophrenia, manic depression, delirium, dementia, severe mental retardation and dyskinesias, such as Huntington's disease or Tourette's Syndrome; neurodegenerative diseases including Alzheimer's, Parkinson's, Multiple sclerosis, and Amyotrophic lateral sclerosis; viral or non-viral infections caused by HIV-1, HIV-2 or other viral- or prion-agents or fungal- or bacterial-organisms; metabolic disorders including Diabetes and obesity and their related syndromes, among others; cardiovascular disorders including reperfusion restenosis, hypertension, coronary thrombosis, clotting disorders, unregulated cell growth disorders, atherosclerosis; ocular disease including glaucoma, retinopathy, and macular degeneration; inflammatory disorders including rheumatoid arthritis, chronic inflammatory bowel disease, chronic inflammatory pelvic disease, multiple sclerosis, asthma, osteoarthritis, bone disorders, psoriasis, atherosclerosis, rhinitis, autoimmunity, and organ transplant rejection.

[0229] The kinase “target region” is the nucleotide base sequence selected from the group consisting of those set forth in SEQ ID NO:1 through SEQ ID NO:114, or the corresponding full-length sequences, a functional derivative thereof, or a fragment thereof, to which the nucleic acid probe will specifically hybridize. Specific hybridization indicates that in the presence of other nucleic acids the probe only hybridizes detectably with the kinase of the invention's target region. Putative target regions can be identified by methods well known in the art consisting of alignment and comparison of the most closely related sequences in the database.

[0230] In preferred embodiments the nucleic acid probe hybridizes to a kinase target region encoding at least 6, 12, 75, 90, 105, 120, 150, 200, 250, 300 or 350 contiguous amino acids of a sequence selected from the group consisting of those set forth in SEQ ID NO:115 through SEQ ID NO:228, or the corresponding full-length amino acid sequence, a portion of any of these sequences that retains functional activity, as described herein, or a functional derivative thereof. Hybridization conditions should be such that hybridization occurs only with the kinase genes in the presence of other nucleic acid molecules. Under stringent hybridization conditions only highly complementary nucleic acid sequences hybridize. Preferably, such conditions prevent hybridization of nucleic acids having more than 1 or 2 mismatches out of 20 contiguous nucleotides. Such conditions are defined supra.

[0231] The diseases for which detection of kinase genes in a sample could be diagnostic include diseases in which kinase nucleic acid (DNA and/or RNA) is amplified in comparison to normal cells. By “amplification” is meant increased numbers of kinase DNA or RNA in a cell compared with normal cells. In normal cells, kinases are typically found as single copy genes. In selected diseases, the chromosomal location of the kinase genes may be amplified, resulting in multiple copies of the gene, or amplification. Gene amplification can lead to amplification of kinase RNA, or kinase RNA can be amplified in the absence of kinase DNA amplification.

[0232] “Amplification” as it refers to RNA can be the detectable presence of kinase RNA in cells, since in some normal cells there is no basal expression of kinase RNA. In other normal cells, a basal level of expression of kinase exists, therefore in these cases amplification is the detection of at least 1-2-fold, and preferably more, kinase RNA, compared to the basal level.

[0233] The diseases that could be diagnosed by detection of kinase nucleic acid in a sample preferably include cancers or other diseases described herein. The test samples suitable for nucleic acid probing methods of the present invention include, for example, cells or nucleic acid extracts of cells, or biological fluids. The samples used in the above-described methods will vary based on the assay format, the detection method and the nature of the tissues, cells or extracts to be assayed. Methods for preparing nucleic acid extracts of cells are well known in the art and can be readily adapted in order to obtain a sample that is compatible with the method utilized.

[0234] The invention also features a method for detection of a nucleic acid encoding a kinase polypeptide in a sample as a diagnostic tool for a disease or disorder, wherein the method comprises: (a) comparing a nucleic acid target region encoding the kinase polypeptide in a sample, where the kinase polypeptide has an amino acid sequence selected from the group consisting those set forth in SEQ ID NO:115 through SEQ ID NO:228, or one or more fragments thereof, with a control nucleic acid target region encoding the kinase polypeptide, or one or more fragments thereof; and (b) detecting differences in sequence or amount between the target region and the control target region, as an indication of the disease or disorder. Preferably the disease is selected from the group consisting of cancers, immune-related diseases and disorders, cardiovascular disease, brain or neuronal-associated diseases, and metabolic disorders. More specifically these diseases include cancer of tissues, blood, or hematopoietic origin, particularly those involving breast, colon, lung, prostate, cervical, brain, ovarian, bladder, or kidney; central or peripheral nervous system diseases and conditions including migraine, pain, sexual dysfunction, mood disorders, attention disorders, cognition disorders, hypotension, and hypertension; psychotic and neurological disorders, including anxiety, schizophrenia, manic depression, delirium, dementia, severe mental retardation and dyskinesias, such as Huntington's disease or Tourette's Syndrome; neurodegenerative diseases including Alzheimer's, Parkinson's, Multiple sclerosis, and Amyotrophic lateral sclerosis; viral or non-viral infections caused by HIV-1, HIV-2 or other viral- or prion-agents or fungal- or bacterial-organisms; metabolic disorders including Diabetes and obesity and their related syndromes, among others; cardiovascular disorders including reperfusion restenosis, coronary thrombosis, clotting disorders, unregulated cell growth disorders, atherosclerosis; ocular disease including glaucoma, retinopathy, and macular degeneration; inflammatory disorders including rheumatoid arthritis, chronic inflammatory bowel disease, chronic inflammatory pelvic disease, multiple sclerosis, asthma, osteoarthritis, psoriasis, atherosclerosis, rhinitis, autoimmunity, and organ transplant rejection.

[0235] The term “comparing” as used herein refers to identifying discrepancies between the nucleic acid target region isolated from a sample, and the control nucleic acid target region. The discrepancies can be in the nucleotide sequences, e.g. insertions, deletions, or point mutations, or in the amount of a given nucleotide sequence. Methods to determine these discrepancies in sequences are well-known to one of ordinary skill in the art. The “control” nucleic acid target region refers to the sequence or amount of the sequence found in normal cells, e.g. cells that are not diseased as discussed previously.

[0236] The invention further provides methods of using probes and primers derived from the sequences presented herein. In one embodiment, the invention provides a method for identification of a nucleic acid encoding a kinase polypeptide in a sample, wherein said method comprises: (a) contacting said sample with a probe as described herein; and (b) isolating a nucleic acid that hybridizes to the probe, thereby identifying said nucleic acid encoding a kinase polypeptide. In an alternative embodiment, the invention provides a method for identification of a human orthologue of a murine kinase polypeptide, wherein said method comprises: (a) contacting a human sample with a probe as described herein; and (b) isolating a nucleic acid that hybridizes to the probe, thereby identifying a nucleic acid encoding a human orthologue of a murine kinase polypeptide.

[0237] Most of these murine genes identified herein are uniquely related in sequence and function to single human kinase genes. Where such an orthologous relationship is known to exist, it is defined by listing the name of the orthologous human gene in Table 1. Where a human ortholog exists for a mouse gene, information on function, expression, catalytic activity, disease association and other biological attributes of the mouse ortholog can be strongly imputed for the human ortholog.

[0238] The invention also provides a transgenic mouse comprising a nucleic acid sequence that encodes a polypeptide substantially identical to an amino acid sequence selected from the group consisting of those set forth in SEQ ID NO:115 through 228; wherein said mouse exhibits a phenotype, relative to a wild-type phenotype, comprising modulation of kinase activity of said polypeptide. In addition, a cell or cell line may be obtained from such a transgenic mouse.

[0239] The invention also provides a knock-out mouse whose genome is disrupted by recombination at a nucleic acid sequence that encodes a polypeptide substantially identical to an amino acid sequence selected from the group consisting of those set forth in SEQ ID NO:115 through 228; so as to produce a phenotype, relative to a wild-type phenotype, comprising absence of kinase activity of said polypeptide in said transgenic mouse. In addition, a cell or cell line may be obtained from such a knock-out mouse.

[0240] Invention transgenic mice and knock-out mice are useful in a method for identifying a substance that modulates the activity of a kinase polypeptide, wherein said method comprises: (a) determining in a sample obtained from such a mouse the presence and/or quantity of kinase activity attributable to the polypeptide encoded by the nucleic acid used to create said mouse; (b) administering a test substance to said mouse; and (c) determining whether said test substance modulates the kinase activity as determined in step (a). Cells or cell lines are also useful in a method for identifying a substance that modulates the activity of a kinase polypeptide, wherein said method comprises: (a) determining in a cell line obtained from the transgenic or knock-out mouse the presence and/or quantity of kinase activity attributable to the polypeptide encoded by the nucleic acid used to create said mouse; (b) contacting said cell line with a test substance; and (c) determining whether said test substance modulates the kinase activity as determined in step (a). Substances found to modulate the activity of a kinase identified using a transgenic or knock-out mouse, or cells or a cell line obtained from such a mouse, can also be used in a method for treating a disease or disorder by their administration to a patient in need of such treatment.

[0241] The summary of the invention described above is not limiting and other features and advantages of the invention will be apparent from the following detailed description of the invention, and from the claims.

### BRIEF DESCRIPTION OF THE FIGURES

[0242] FIG. 1 shows the nucleotide sequences for mouse protein kinases oriented in a 5′ to 3′ direction (SEQ ID NO:1-114). N's within the sequence indicate nucleotides which are predicted by homology to be present within the nucleic acid but whose exact sequence could not be predicted.

[0243] FIG. 2 shows the amino acid sequences for the mouse protein kinases encoded by SEQ ID No. 1-114 in the direction of translation (SEQ ID NO:115 through SEQ ID NO:228). If a predicted stop codon is within the coding region, it is indicated by an ‘*.’. X's indicate amino acids which are predicted by homology to be present within the polypeptide but whose exact sequence could not be predicted.

### DETAILED DESCRIPTION OF THE INVENTION

[0244] The invention provides, inter alia, protein and lipid kinases and kinase-like genes, as well as fragments thereof, which have been identified in genomic and expressed sequence databases. In part, the invention provides nucleic acid molecules that are capable of encoding polypeptides having a kinase or kinase-like activity. By reference to Tables and Figures provided herein, genes of the invention can be better understood. The invention additionally provides a number of different embodiments, such as those described below.

[0245] All of the sequences are derived from mouse genomic and expressed DNA.

[0246] Nucleic Acid Probes, Methods, and Kits for Detection of Kinases

[0247] The invention additionally provides nucleic acid probes and uses therefor. A nucleic acid probe of the present invention may be used to probe an appropriate chromosomal or cDNA library by usual hybridization methods to obtain other nucleic acid molecules of the present invention. A chromosomal DNA or cDNA library may be prepared from appropriate cells according to recognized methods in the art (cf. “Molecular Cloning: A Laboratory Manual”, second edition, Cold Spring Harbor Laboratory, Sambrook, Fritsch, & Maniatis, eds., 1989).

[0248] In the alternative, chemical synthesis can be carried out in order to obtain nucleic acid probes having nucleotide sequences which correspond to N-terminal and C-terminal portions of the amino acid sequence of the polypeptide of interest. The synthesized nucleic acid probes may be used as primers in a polymerase chain reaction (PCR) carried out in accordance with recognized PCR techniques, essentially according to PCR Protocols, “A Guide to Methods and Applications”, Academic Press, Michael, et al., eds., 1990, utilizing the appropriate chromosomal or cDNA library to obtain the fragment of the present invention.

[0249] One skilled in the art can readily design such probes based on the sequence disclosed herein using methods of computer alignment and sequence analysis known in the art (“Molecular Cloning: A Laboratory Manual”, 1989, supra). The hybridization probes of the present invention can be labeled by standard labeling techniques such as with a radiolabel, enzyme label, fluorescent label, biotin-avidin label, chemiluminescence, and the like. After hybridization, the probes may be visualized using known methods.

[0250] The nucleic acid probes of the present invention include RNA, as well as DNA probes, such probes being generated using techniques known in the art. The nucleic acid probe may be immobilized on a solid support. Examples of such solid supports include, but are not limited to, plastics such as polycarbonate, complex carbohydrates such as agarose and sepharose, and acrylic resins, such as polyacrylamide and latex beads. Techniques for coupling nucleic acid probes to such solid supports are well known in the art.

[0251] The test samples suitable for nucleic acid probing methods of the present invention include, for example, cells or nucleic acid extracts of cells, or biological fluids. The samples used in the above-described methods will vary based on the assay format, the detection method and the nature of the tissues, cells or extracts to be assayed. Methods for preparing nucleic acid extracts of cells are well known in the art and can be readily adapted in order to obtain a sample which is compatible with the method utilized.

[0252] One method of detecting the presence of nucleic acids of the invention in a sample comprises (a) contacting said sample with the above-described nucleic acid probe under conditions such that hybridization occurs, and (b) detecting the presence of said probe bound to said nucleic acid molecule. One skilled in the art would select the nucleic acid probe according to techniques known in the art as described above. Samples to be tested include but should not be limited to RNA samples of human tissue.

[0253] A kit for detecting the presence of nucleic acids of the invention in a sample comprises at least one container means having disposed therein the above-described nucleic acid probe. The kit may further comprise other containers comprising one or more of the following: wash reagents and reagents capable of detecting the presence of bound nucleic acid probe. Examples of detection reagents include, but are not limited to radiolabelled probes, enzymatic labeled probes (horseradish peroxidase, alkaline phosphatase), and affinity labeled probes (biotin, avidin, or steptavidin). Preferably, the kit further comprises instructions for use.

[0254] In detail, a compartmentalized kit includes any kit in which reagents are contained in separate containers. Such containers include small glass containers, plastic containers or strips of plastic or paper. Such containers allow the efficient transfer of reagents from one compartment to another compartment such that the samples and reagents are not cross-contaminated and the agents or solutions of each container can be added in a quantitative fashion from one compartment to another. Such containers will include a container which will accept the test sample, a container which contains the probe or primers used in the assay, containers which contain wash reagents (such as phosphate buffered saline, Tris-buffers, and the like), and containers which contain the reagents used to detect the hybridized probe, bound antibody, amplified product, or the like. One skilled in the art will readily recognize that the nucleic acid probes described in the present invention can readily be incorporated into one of the established kit formats which are well known in the art.

[0255] Categorization of the Polypeptides According to the Invention

[0256] For a number of protein kinases of the invention, there is provided a classification of the protein class and family to which it belongs, a summary of non-catalytic protein motifs, as well as a chromosomal location, which provides information on function, regulation and/or therapeutic utility for each of the proteins. Amplification of chromosomal region can be associated with various cancers.

[0257] The kinase classification and protein domains often reflect pathways, cellular roles, or mechanisms of up- or down-stream regulation. Also disease-relevant genes often occur in families of related genes. For example, if one member of a kinase family functions as an oncogene, a tumor suppressor, or has been found to be disrupted in an immune, neurologic, cardiovascular, or metabolic disorder, frequently other family members may play a similar role.

[0258] Chromosomal location can identify candidate targets for a tumor amplicon or a tumor-suppressor locus. Summaries of prevalent tumor amplicons are available in the literature, and can identify tumor types to experimentally be confirmed to contain amplified copies of a kinase gene which localizes to an adjacent region.

[0259] As described herein, the polypeptides of the present invention can be classified. The salient features related to the biological and clinical implications of these different groups are described hereafter in more general terms.

[0260] A more specific characterization of the polypeptides of the invention, including potential biological and clinical implications, is provided, e.g., in EXAMPLES 2a and 2b.

[0261] Classification of Polypeptides Exhibiting Kinase Activity

[0262] The classification of the polypeptides described in this application is found in Tables 1 and 2. The present application describes members of the following superfamilies: protein kinase, lipid kinase, atypical protein kinase. The present application also describes members of the following groups: AGC group, CAMK Group, CKI (or CK1) Group, CMGC Group, OTHER Group, STE Group, TK Group, DAG (diacylglycerol) Group, BRD Group.

[0263] Potential biological and clinical implications of these novel kinases are described below.

[0264] Therapeutic Methods According to the Invention:

[0265] Diagnostics:

[0266] The invention provides methods for detecting a polypeptide in a sample as a diagnostic tool for diseases or disorders, wherein the method comprises the steps of: (a) contacting the sample with a nucleic acid probe which hybridizes under hybridization assay conditions to a nucleic acid target region of a polypeptide selected from the group consisting of SEQ ID NO:115 through SEQ ID NO:228, said probe comprising the nucleic acid sequence encoding the polypeptide, fragments thereof, and the complements of the sequences and fragments; and (b) detecting the presence or amount of the probe:target region hybrid as an indication of the disease.

[0267] In preferred embodiments of the invention, the disease or disorder is selected from the group consisting of rheumatoid arthritis, atherosclerosis, autoimmune disorders, organ transplantation, myocardial infarction, cardiomyopathies, stroke, renal failure, oxidative stress-related neurodegenerative disorders, metabolic disorder including diabetes, reproductive disorders including infertility, and cancer.

[0268] Hybridization conditions should be such that hybridization occurs only with the genes in the presence of other nucleic acid molecules. Under stringent hybridization conditions only highly complementary nucleic acid sequences hybridize. Preferably, such conditions prevent hybridization of nucleic acids having 1 or 2 mismatches out of 20 contiguous nucleotides. Such conditions are defined supra.

[0269] The diseases for which detection of genes in a sample could be diagnostic include diseases in which nucleic acid (DNA and/or RNA) is amplified in comparison to normal cells. By “amplification” is meant increased numbers of DNA or RNA in a cell compared with normal cells.

[0270] “Amplification” as it refers to RNA can be the detectable presence of RNA in cells, since in some normal cells there is no basal expression of RNA. In other normal cells, a basal level of expression exists, therefore in these cases amplification is the detection of at least 1-2-fold, and preferably more, compared to the basal level.

[0271] The diseases that could be diagnosed by detection of nucleic acid in a sample preferably include cancers. The test samples suitable for nucleic acid probing methods of the present invention include, for example, cells or nucleic acid extracts of cells, or biological fluids. The samples used in the above-described methods will vary based on the assay format, the detection method and the nature of the tissues, cells or extracts to be assayed. Methods for preparing nucleic acid extracts of cells are well known in the art and can be readily adapted in order to obtain a sample that is compatible with the method utilized.

[0272] Antibodies, Hybridomas, Methods of Use and Kits for Detection of Kinases

[0273] The present invention relates to an antibody having binding affinity to a kinase of the invention. The polypeptide may have the amino acid sequence selected from the group consisting of those set forth in SEQ ID NO:115 through SEQ ID NO:228, or a functional derivative thereof, or at least 9 contiguous amino acids thereof (preferably, at least 20, 30, 35, or 40 contiguous amino acids thereof).

[0274] The present invention also relates to an antibody having specific binding affinity to a kinase of the invention. Such an antibody may be isolated by comparing its binding affinity to a kinase of the invention with its binding affinity to other polypeptides. Those which bind selectively to a kinase of the invention would be chosen for use in methods requiring a distinction between a kinase of the invention and other polypeptides. Such methods could include, but should not be limited to, the analysis of altered kinase expression in tissue containing other polypeptides.

[0275] The kinases of the present invention can be used in a variety of procedures and methods, such as for the generation of antibodies, for use in identifying pharmaceutical compositions, and for studying DNA/protein interaction.

[0276] The kinases of the present invention can be used to produce antibodies or hybridomas. One skilled in the art will recognize that if an antibody is desired, such a peptide could be generated as described herein and used as an immunogen. The antibodies of the present invention include monoclonal and polyclonal antibodies, as well fragments of these antibodies, and humanized forms. Humanized forms of the antibodies of the present invention may be generated using one of the procedures known in the art such as chimerization or CDR grafting.

[0277] The present invention also relates to a hybridoma which produces the above-described monoclonal antibody, or binding fragment thereof. A hybridoma is an immortalized cell line which is capable of secreting a specific monoclonal antibody.

[0278] In general, techniques for preparing monoclonal antibodies and hybridomas are well known in the art (Campbell, “Monoclonal Antibody Technology: Laboratory Techniques in Biochemistry and Molecular Biology,” Elsevier Science Publishers, Amsterdam, The Netherlands, 1984; St. Groth et al., J. Immunol. Methods 35:1-21, 1980). Any animal (mouse, rabbit, and the like) which is known to produce antibodies can be immunized with the selected polypeptide. Methods for immunization are well known in the art. Such methods include subcutaneous or intraperitoneal injection of the polypeptide. One skilled in the art will recognize that the amount of polypeptide used for immunization will vary based on the animal which is immunized, the antigenicity of the polypeptide and the site of injection.

[0279] The polypeptide may be modified or administered in an adjuvant in order to increase the peptide antigenicity. Methods of increasing the antigenicity of a polypeptide are well known in the art. Such procedures include coupling the antigen with a heterologous protein (such as globulin or β-galactosidase) or through the inclusion of an adjuvant during immunization.

[0280] For monoclonal antibodies, spleen cells from the immunized animals are removed, fused with myeloma cells, such as SP2/0-Agl4 myeloma cells, and allowed to become monoclonal antibody producing hybridoma cells. Any one of a number of methods well known in the art can be used to identify the hybridoma cell which produces an antibody with the desired characteristics. These include screening the hybridomas with an ELISA assay, western blot analysis, or radioimmunoassay (Lutz et al., Exp. Cell Res. 175:109-124, 1988). Hybridomas secreting the desired antibodies are cloned and the class and subclass are determined using procedures known in the art (Campbell, “Monoclonal Antibody Technology: Laboratory Techniques in Biochemistry and Molecular Biology”, supra, 1984).

[0281] For polyclonal antibodies, antibody-containing antisera is isolated from the immunized animal and is screened for the presence of antibodies with the desired specificity using one of the above-described procedures. The above-described antibodies may be detectably labeled. Antibodies can be detectably labeled through the use of radioisotopes, affinity labels (such as biotin, avidin, and the like), enzymatic labels (such as horseradish peroxidase, alkaline phosphatase, and the like) fluorescent labels (such as FITC or rhodamine, and the like), paramagnetic atoms, and the like. Procedures for accomplishing such labeling are well-known in the art, for example, see Stemberger et al., J. Histochem. Cytochem. 18:315, 1970; Bayer et al., Meth. Enzym. 62:308, 1979; Engval et al., Immunol. 109:129, 1972; Goding, J. Immunol. Meth. 13:215, 1976. The labeled antibodies of the present invention can be used for in vitro, in vivo, and in situ assays to identify cells or tissues which express a specific peptide.

[0282] The above-described antibodies may also be immobilized on a solid support. Examples of such solid supports include plastics such as polycarbonate, complex carbohydrates such as agarose and sepharose, acrylic resins such as polyacrylamide and latex beads. Techniques for coupling antibodies to such solid supports are well known in the art (Weir et al., “Handbook of Experimental Immunology” 4th Ed., Blackwell Scientific Publications, Oxford, England, Chapter 10, 1986; Jacoby et al., Meth. Enzym. 34, Academic Press, N.Y., 1974). The immobilized antibodies of the present invention can be used for in vitro, in vivo, and in situ assays as well as in immunochromotography.

[0283] Furthermore, one skilled in the art can readily adapt currently available procedures, as well as the techniques, methods and kits disclosed herein with regard to antibodies, to generate peptides capable of binding to a specific peptide sequence in order to generate rationally designed antipeptide peptides (Hurby et al., “Application of Synthetic Peptides: Antisense Peptides”, In Synthetic Peptides, A User's Guide, W. H. Freeman, N.Y., pp. 289-307, 1992; Kaspczak et al., Biochemistry 28:9230-9238, 1989).

[0284] Anti-peptide peptides can be generated by replacing the basic amino acid residues found in the peptide sequences of the kinases of the invention with acidic residues, while maintaining hydrophobic and uncharged polar groups. For example, lysine, arginine, and/or histidine residues are replaced with aspartic acid or glutamic acid and glutamic acid residues are replaced by lysine, arginine or histidine.

[0285] The present invention also encompasses a method of detecting a kinase polypeptide in a sample, comprising: (a) contacting the sample with an above-described antibody, under conditions such that immunocomplexes form, and (b) detecting the presence of said antibody bound to the polypeptide. In detail, the methods comprise incubating a test sample with one or more of the antibodies of the present invention and assaying whether the antibody binds to the test sample. Altered levels of a kinase of the invention in a sample as compared to normal levels may indicate disease.

[0286] Conditions for incubating an antibody with a test sample vary. Incubation conditions depend on the format employed in the assay, the detection methods employed, and the type and nature of the antibody used in the assay. One skilled in the art will recognize that any one of the commonly available immunological assay formats (such as radioimmunoassays, enzyme-linked immunosorbent assays, diffusion-based Ouchterlony, or rocket immunofluorescent assays) can readily be adapted to employ the antibodies of the present invention. Examples of such assays can be found in Chard (“An Introduction to Radioimmunoassay and Related Techniques” Elsevier Science Publishers, Amsterdam, The Netherlands, 1986), Bullock et al. (“Techniques in Immunocytochemistry,” Academic Press, Orlando, Fla. Vol. 1, 1982; Vol. 2, 1983; Vol. 3, 1985), Tijssen (“Practice and Theory of Enzyme Immunoassays: Laboratory Techniques in Biochemistry and Molecular Biology,” Elsevier Science Publishers, Amsterdam, The Netherlands, 1985).

[0287] The immunological assay test samples of the present invention include cells, protein or membrane extracts of cells, or biological fluids such as blood, serum, plasma, or urine. The test samples used in the above-described method will vary based on the assay format, nature of the detection method and the tissues, cells or extracts used as the sample to be assayed. Methods for preparing protein extracts or membrane extracts of cells are well known in the art and can readily be adapted in order to obtain a sample which is testable with the system utilized.

[0288] A kit contains all the necessary reagents to carry out the previously described methods of detection. The kit may comprise: (i) a first container means containing an above-described antibody, and (ii) second container means containing a conjugate comprising a binding partner of the antibody and a label. In another preferred embodiment, the kit further comprises one or more other containers comprising one or more of the following: wash reagents and reagents capable of detecting the presence of bound antibodies.

[0289] Examples of detection reagents include, but are not limited to, labeled secondary antibodies, or in the alternative, if the primary antibody is labeled, the chromophoric, enzymatic, or antibody binding reagents which are capable of reacting with the labeled antibody. The compartmentalized kit may be as described above for nucleic acid probe kits. One skilled in the art will readily recognize that the antibodies described in the present invention can readily be incorporated into one of the established kit formats which are well known in the art.

[0290] Isolation of Compounds Capable of Interacting with Kinases

[0291] The present invention also relates to a method of detecting a compound capable of binding to a kinase of the invention comprising incubating the compound with a kinase of the invention and detecting the presence of the compound bound to the kinase. The compound may be present within a complex mixture, for example, serum, body fluid, or cell extracts.

[0292] The present invention also relates to a method of detecting an agonist or antagonist of kinase activity or kinase binding partner activity comprising incubating cells that produce a kinase of the invention in the presence of a compound and detecting changes in the level of kinase activity or kinase binding partner activity. The compounds thus identified would produce a change in activity indicative of the presence of the compound.

[0293] The compound may be present within a complex mixture, for example, serum, body fluid, or cell extracts. Once the compound is identified it can be isolated using techniques well known in the art.

[0294] Modulating Polypeptide Activity:

[0295] The invention additionally provides methods for treating a disease or abnormal condition by administering to a patient in need of such treatment a substance that modulates the activity of a polypeptide selected from the group consisting of SEQ ID NO:115 through SEQ ID NO:228. Preferably, the disease is selected from the group consisting of rheumatoid arthritis, atherosclerosis, autoimmune disorders, organ transplantation, myocardial infarction, cardiomyopathies, stroke, renal failure, oxidative stress-related neurodegenerative disorders, metabolic and reproductive disorders, and cancer.

[0296] Substances useful for treatment of disorders or diseases preferably show positive results in one or more assays for an activity corresponding to treatment of the disease or disorder in question Substances that modulate the activity of the polypeptides preferably include, but are not limited to, antisense oligonucleotides and inhibitors of protein kinases.

[0297] The term “preventing” refers to decreasing the probability that an organism contracts or develops an abnormal condition.

[0298] The term “treating” refers to having a therapeutic effect and at least partially alleviating or abrogating an abnormal condition in the organism.

[0299] The term “therapeutic effect” refers to the inhibition or activation factors causing or contributing to the abnormal condition. A therapeutic effect relieves to some extent one or more of the symptoms of the abnormal condition. In reference to the treatment of abnormal conditions, a therapeutic effect can refer to one or more of the following: (a) a decrease in the proliferation, growth, and/or differentiation of cells; (b) inhibition (, slowing or stopping) of cell death; (c) inhibition of degeneration; (d) relieving to some extent one or more of the symptoms associated with the abnormal condition; and (e) enhancing the function of the affected population of cells. Compounds demonstrating efficacy against abnormal conditions can be identified as described herein.

[0300] The term “abnormal condition” refers to a function in the cells or tissues of an organism that deviates from their normal functions in that organism. An abnormal condition can relate to cell proliferation, cell differentiation or cell survival. An abnormal condition may also include irregularities in cell cycle progression, i.e., irregularities in normal cell cycle progression through mitosis and meiosis.

[0301] Abnormal cell proliferative conditions include cancers such as fibrotic and mesangial disorders, abnormal angiogenesis and vasculogenesis, wound healing, psoriasis, diabetes mellitus, and inflammation.

[0302] Abnormal differentiation conditions include, but are not limited to, neurodegenerative disorders, slow wound healing rates, and slow tissue grafting healing rates.

[0303] Abnormal cell survival conditions may also relate to conditions in which programmed cell death (apoptosis) pathways are activated or abrogated. A number of protein kinases are associated with the apoptosis pathways. Aberrations in the function of any one of the protein kinases could lead to cell immortality or premature cell death.

[0304] The term “aberration”, in conjunction with the function of a kinase in a signal transduction process, refers to a kinase that is over- or under-expressed in an organism, mutated such that its catalytic activity is lower or higher than wild-type protein kinase activity, mutated such that it can no longer interact with a natural binding partner, is no longer modified by another protein kinase or protein phosphatase, or no longer interacts with a natural binding partner.

[0305] The term “administering” relates to a method of incorporating a compound into cells or tissues of an organism. The abnormal condition can be prevented or treated when the cells or tissues of the organism exist within the organism or outside of the organism. Cells existing outside the organism can be maintained or grown in cell culture dishes. For cells harbored within the organism, many techniques exist in the art to administer compounds, including (but not limited to) oral, parenteral, dermal, injection, and aerosol applications. For cells outside of the organism, multiple techniques exist in the art to administer the compounds, including (but not limited to) cell microinjection techniques, transformation techniques and carrier techniques.

[0306] The abnormal condition can also be prevented or treated by administering a compound to a group of cells having an aberration in a signal transduction pathway to an organism. The effect of administering a compound on organism function can then be monitored. The organism is preferably a mouse, rat, rabbit, guinea pig or goat, more preferably a monkey or ape, and most preferably a human.

[0307] The present invention also encompasses a method of agonizing (stimulating) or antagonizing kinase associated activity in a mammal comprising administering to said mammal an agonist or antagonist to a kinase of the invention in an amount sufficient to effect said agonism or antagonism. A method of treating diseases in a mammal with an agonist or antagonist of the activity of one of the kinases of the invention comprising administering the agonist or antagonist to a mammal in an amount sufficient to agonize or antagonize kinase-associated functions is also encompassed in the present application.

[0308] In an effort to discover novel treatments for diseases, biomedical researchers and chemists have designed, synthesized, and tested molecules that inhibit the function of protein kinases. Some small organic molecules form a class of compounds that modulate the function of protein kinases. Examples of molecules that have been reported to inhibit the function of some protein kinases include, but are not limited to, bis monocyclic, bicyclic or heterocyclic aryl compounds (PCT WO 92/20642, published Nov. 26, 1992 by Maguire et al.), vinylene-azaindole derivatives (PCT WO 94/14808, published Jul. 7, 1994 by Ballinari et al.), 1-cyclopropyl-4-pyridyl-quinolones (U.S. Pat. No. 5,330,992), styryl compounds (U.S. Pat. No. 5,217,999), styryl-substituted pyridyl compounds (U.S. Pat. No. 5,302,606), certain quinazoline derivatives (EP Application No. 0 566 266 A1), seleoindoles and selenides (PCT WO 94/03427, published Feb. 17, 1994 by Denny et al.), tricyclic polyhydroxylic compounds (PCT WO 92/21660, published Dec. 10, 1992 by Dow), and benzylphosphonic acid compounds (PCT WO 91/15495, published Oct. 17, 1991 by Dow et al).

[0309] Compounds that can traverse cell membranes and are resistant to acid hydrolysis are potentially advantageous as therapeutics as they can become highly bioavailable after being administered orally to patients. However, many of these protein kinase inhibitors only weakly inhibit the function of protein kinases. In addition, many inhibit a variety of protein kinases and will therefore cause multiple side-effects as therapeutics for diseases.

[0310] Some indolinone compounds, however, form classes of acid resistant and membrane permeable organic molecules. WO 96/22976 (published Aug. 1, 1996 by Ballinari et al.) describes hydrosoluble indolinone compounds that harbor tetralin, naphthalene, quinoline, and indole substituents fused to the oxindole ring. These bicyclic substituents are in turn substituted with polar moieties including hydroxylated alkyl, phosphate, and ether moieties. U.S. patent application Ser. No. 08/702,232, filed Aug. 23, 1996, entitled “Indolinone Combinatorial Libraries and Related Products and Methods for the Treatment of Disease” by Tang et al. (Lyon & Lyon Docket No. 221/187) and 08/485,323, filed Jun. 7, 1995, entitled “Benzylidene-Z-Indoline Compounds for the Treatment of Disease” by Tang et al. (Lyon & Lyon Docket No. 223/298) and International Patent Publications WO 96/40116, published Dec. 19, 1996 by Tang, et al., and WO 96/22976, published Aug. 1, 1996 by Ballinari et al., all of which are incorporated herein by reference in their entirety, including any drawings, figures, or tables, describe indolinone chemical libraries of indolinone compounds harboring other bicyclic moieties as well as monocyclic moieties fused to the oxindole ring. Application Ser. No. 08/702,232, filed Aug. 23, 1996, entitled “Indolinone Combinatorial Libraries and Related Products and Methods for the Treatment of Disease” by Tang et al. (Lyon & Lyon Docket No. 221/187), 08/485,323, filed Jun. 7, 1995, entitled “Benzylidene-Z-Indoline Compounds for the Treatment of Disease” by Tang et al. (Lyon & Lyon Docket No. 223/298), and WO 96/22976, published Aug. 1, 1996 by Ballinari et al. teach methods of indolinone synthesis, methods of testing the biological activity of indolinone compounds in cells, and inhibition patterns of indolinone derivatives.

[0311] Other examples of substances capable of modulating kinase activity include, but are not limited to, tyrphostins, quinazolines, quinoxolines, and quinolines. The quinazolines, tyrphostins, quinolines, and quinoxolines referred to above include well known compounds such as those described in the literature. For example, representative publications describing quinazolines include Barker et al., EPO Publication No. 0 520 722 A1; Jones et al., U.S. Pat. No. 4,447,608; Kabbe et al., U.S. Pat. No. 4,757,072; Kaul and Vougioukas, U.S. Pat. No. 5,316,553; Kreighbaum and Corner, U.S. Pat. No. 4,343,940; Pegg and Wardleworth, EPO Publication No. 0 562 734 A1; Barker et al., (1991) Proc. of Am. Assoc. for Cancer Research 32:327; Bertino, J. R., (1979) Cancer Research 3:293-304; Bertino, J. R., (1979) Cancer Research 9(2 part 1):293-304; Curtin et al., (1986) Br. J. Cancer 53:361-368; Fernandes et al., (1983) Cancer Research 43:1117-1123; Ferris et al. J. Org. Chem. 44(2):173-178; Fry et al., (1994) Science 265:1093-1095; Jackman et al., (1981) Cancer Research 51:5579-5586; Jones et al. J. Med. Chem. 29(6):1114-1118; Lee and Skibo, (1987) Biochemistry 26(23):7355-7362; Lemus et al., (1989) J. Org. Chem. 54:3511-3518; Ley and Seng, (1975) Synthesis 1975:415-522; Maxwell et al., (1991) Magnetic Resonance in Medicine 17:189-196; Mini et al., (1985) Cancer Research 45:325-330; Phillips and Castle, J. (1980) Heterocyclic Chem. 17(19):1489-1596; Reece et al., (1977) Cancer Research 47(11):2996-2999; Sculier et al., (1986) Cancer Immunol. and Immunother. 23, A65; Sikora et al., (1984) Cancer Letters 23:289-295; Sikora et al., (1988) Analytical Biochem. 172:344-355; all of which are incorporated herein by reference in their entirety, including any drawings.

[0312] Quinoxaline is described in Kaul and Vougioukas, U.S. Pat. No. 5,316,553, incorporated herein by reference in its entirety, including any drawings.

[0313] Quinolines are described in Dolle et al., (1994) J. Med. Chem. 37:2627-2629; MaGuire, J. (1994) Med. Chem. 37:2129-2131; Burke et al., (1993) J. Med. Chem. 36:425-432; and Burke et al. (1992) BioOrganic Med. Chem. Letters 2:1771-1774, all of which are incorporated by reference in their entirety, including any drawings.

[0314] Tyrphostins are described in Allen et al., (1993) Clin. Exp. Immunol. 91:141-156; Anafi et al., (1993) Blood 82:12, 3524-3529; Baker et al., (1992) J Cell Sci. 102:543-555; Bilder et al., (1991) Amer. Physiol. Soc. pp. 6363-6143:C721-C730; Brunton et al., (1992) Proceedings of Amer. Assoc. Cancer Rsch. 33:558; Bryckaert et al., (1992) Exp. Cell Research 199:255-261; Dong et al., (1993) J Leukocyte Biology 53:53-60; Dong et al., (1993) J. Immunol. 151(5):2717-2724; Gazit et al., (1989) J. Med. Chem. 32, 2344-2352; Gazit et al., (1993) J. Med. Chem. 36:3556-3564; Kaur et al., (1994) Anti-Cancer Drugs 5:213-222; King et al., (1991) Biochem. J. 275:413-418; Kuo et al., (1993) Cancer Letters 74:197-202; Levitzki, A., (1992) The FASEB J. 6:3275-3282; Lyall et al., (1989) J. Biol. Chem. 264:14503-14509; Peterson et al., (1993) The Prostate 22:335-345; Pillemer et al., (1992) Int. J. Cancer 50:80-85; Posner et al., (1993) Molecular Pharmacology 45:673-683; Rendu et al., (1992) Biol. Pharmacology 44(5):881-888; Sauro and Thomas, (1993) Life Sciences 53:371-376; Sauro and Thomas, (1993) J. Pharm. and Experimental Therapeutics 267(3):119-1125; Wolbring et al., (1994) J. Biol. Chem. 269(36):22470-22472; and Yoneda et al., (1991) Cancer Research 51:4430-4435; all of which are incorporated herein by reference in their entirety, including any drawings.

[0315] Other compounds that could be used as modulators include oxindolinones such as those described in U.S. patent application Ser. No. 08/702,232 filed Aug. 23, 1996, incorporated herein by reference in its entirety, including any drawings.

[0316] Recombinant DNA Technology:

[0317] DNA Constructs Comprising a Kinase Nucleic Acid Molecule and

[0318] Cells Containing These Constructs:

[0319] The present invention also relates to a recombinant DNA molecule comprising, 5′ to 3′, a promoter effective to initiate transcription in a host cell and the above-described nucleic acid molecules. In addition, the present invention relates to a recombinant DNA molecule comprising a vector and an above-described nucleic acid molecule. The present invention also relates to a nucleic acid molecule comprising a transcriptional region functional in a cell, a sequence complementary to an RNA sequence encoding an amino acid sequence corresponding to the above-described polypeptide, and a transcriptional termination region functional in said cell. The above-described molecules may be isolated and/or purified DNA molecules.

[0320] The present invention also relates to a cell or organism that contains an above-described nucleic acid molecule and thereby is capable of expressing a polypeptide. The polypeptide may be purified from cells which have been altered to express the polypeptide. A cell is said to be “altered to express a desired polypeptide” when the cell, through genetic manipulation, is made to produce a protein which it normally does not produce or which the cell normally produces at lower levels. One skilled in the art can readily adapt procedures for introducing and expressing either genomic, cDNA, or synthetic sequences into either eukaryotic or prokaryotic cells.

[0321] A nucleic acid molecule, such as DNA, is said to be “capable of expressing” a polypeptide if it contains nucleotide sequences which contain transcriptional and translational regulatory information and such sequences are “operably linked” to nucleotide sequences which encode the polypeptide. An operable linkage is a linkage in which the regulatory DNA sequences and the DNA sequence sought to be expressed are connected in such a way as to permit gene sequence expression. The precise nature of the regulatory regions needed for gene sequence expression may vary from organism to organism, but shall in general include a promoter region which, in prokaryotes, contains both the promoter (which directs the initiation of RNA transcription) as well as the DNA sequences which, when transcribed into RNA, will signal synthesis initiation. Such regions will normally include those 5′-non-coding sequences involved with initiation of transcription and translation, such as the TATA box, capping sequence, CAAT sequence, and the like.

[0322] If desired, the non-coding region 3′ to the sequence encoding a kinase of the invention may be obtained by the above-described methods. This region may be retained for its transcriptional termination regulatory sequences, such as termination and polyadenylation. Thus, by retaining the 3′-region naturally contiguous to the DNA sequence encoding a kinase of the invention, the transcriptional termination signals may be provided. Where the transcriptional termination signals are not satisfactorily functional in the expression host cell, then a 3′ region functional in the host cell may be substituted.

[0323] Two DNA sequences (such as a promoter region sequence and a sequence encoding a kinase of the invention) are said to be operably linked if the nature of the linkage between the two DNA sequences does not (1) result in the introduction of a frame-shift mutation, (2) interfere with the ability of the promoter region sequence to direct the transcription of a gene sequence encoding a kinase of the invention, or (3) interfere with the ability of the gene sequence of a kinase of the invention to be transcribed by the promoter region sequence. Thus, a promoter region would be operably linked to a DNA sequence if the promoter were capable of effecting transcription of that DNA sequence. Thus, to express a gene encoding a kinase of the invention, transcriptional and translational signals recognized by an appropriate host are necessary.

[0324] The present invention encompasses the expression of a gene encoding a kinase of the invention (or a functional derivative thereof) in either prokaryotic or eukaryotic cells. Prokaryotic hosts are, generally, very efficient and convenient for the production of recombinant proteins and are, therefore, one type of preferred expression system for kinases of the invention. Prokaryotes most frequently are represented by various strains of E. coli. However, other microbial strains may also be used, including other bacterial strains.

[0325] In prokaryotic systems, plasmid vectors that contain replication sites and control sequences derived from a species compatible with the host may be used. Examples of suitable plasmid vectors may include pBR322, pUC118, pUC119 and the like; suitable phage or bacteriophage vectors may include λgt10, λgt11 and the like; and suitable virus vectors may include pMAM-neo, pKRC and the like. Preferably, the selected vector of the present invention has the capacity to replicate in the selected host cell.

[0326] Recognized prokaryotic hosts include bacteria such as E. coli, Bacillus, Streptomyces, Pseudomonas, Salmonella, Serratia, and the like. However, under such conditions, the polypeptide will not be glycosylated. The prokaryotic host must be compatible with the replicon and control sequences in the expression plasmid.

[0327] To express a kinase of the invention (or a functional derivative thereof) in a prokaryotic cell, it is necessary to operably link the sequence encoding the kinase of the invention to a functional prokaryotic promoter. Such promoters may be either constitutive or, more preferably, regulatable (i.e., inducible or derepressible). Examples of constitutive promoters include the int promoter of bacteriophage λ, the bla promoter of the β-lactamase gene sequence of pBR322, and the cat promoter of the chloramphenicol acetyl transferase gene sequence of pPR325, and the like. Examples of inducible prokaryotic promoters include the major right and left promoters of bacteriophage λ (P_{L} and P_{R}), the trp, λrecA, acZ, λacI, and gal promoters of E. coli, the α-amylase (Ulmanen et al., J. Bacteriol. 162:176-182, 1985) and the ζ-28-specific promoters of B. subtilis (Gilman et al., Gene Sequence 32:11-20, 1984), the promoters of the bacteriophages of Bacillus (Gryczan, in: The Molecular Biology of the Bacilli, Academic Press, Inc., NY, 1982), and Streptomyces promoters (Ward et al., Mol. Gen. Genet. 203:468-478, 1986). Prokaryotic promoters are reviewed by Glick (Ind. Microbiot. 1:277-282, 1987), Cenatiempo (Biochimie 68:505-516, 1986), and Gottesman (Ann. Rev. Genet. 18:415-442, 1984).

[0328] Proper expression in a prokaryotic cell also requires the presence of a ribosome-binding site upstream of the gene sequence-encoding sequence. Such ribosome-binding sites are disclosed, for example, by Gold et al. (Ann. Rev. Microbiol. 35:365-404, 1981). The selection of control sequences, expression vectors, transformation methods, and the like, are dependent on the type of host cell used to express the gene. As used herein, “cell”, “cell line”, and “cell culture” may be used interchangeably and all such designations include progeny. Thus, the words “transformants” or “transformed cells” include the primary subject cell and cultures derived therefrom, without regard to the number of transfers. It is also understood that all progeny may not be precisely identical in DNA content, due to deliberate or inadvertent mutations. However, as defined, mutant progeny have the same functionality as that of the originally transformed cell.

[0329] Host cells which may be used in the expression systems of the present invention are not strictly limited, provided that they are suitable for use in the expression of the kinase polypeptide of interest. Suitable hosts may often include eukaryotic cells. Preferred eukaryotic hosts include, for example, yeast, fungi, insect cells, mammalian cells either in vivo, or in tissue culture. Mammalian cells which may be useful as hosts include HeLa cells, cells of fibroblast origin such as VERO or CHO-K1, or cells of lymphoid origin and their derivatives. Preferred mammalian host cells include SP2/0 and J558L, as well as neuroblastoma cell lines such as IMR 332, which may provide better capacities for correct post-translational processing.

[0330] In addition, plant cells are also available as hosts, and control sequences compatible with plant cells are available, such as the cauliflower mosaic virus ³⁵S and 19S, and nopaline synthase promoter and polyadenylation signal sequences. Another preferred host is an insect cell, for example the Drosophila larvae. Using insect cells as hosts, the Drosophila alcohol dehydrogenase promoter can be used (Rubin, Science 240:1453-1459, 1988). Alternatively, baculovirus vectors can be engineered to express large amounts of kinases of the invention in insect cells (Jasny, Science 238:1653, 1987; Miller et al., in: Genetic Engineering, Vol. 8, Plenum, Setlow et al., eds., pp. 277-297, 1986).

[0331] Any of a series of yeast expression systems can be utilized which incorporate promoter and termination elements from the actively expressed sequences coding for glycolytic enzymes that are produced in large quantities when yeast are grown in mediums rich in glucose. Known glycolytic gene sequences can also provide very efficient transcriptional control signals. Yeast provides substantial advantages in that it can also carry out post-translational modifications. A number of recombinant DNA strategies exist utilizing strong promoter sequences and high copy number plasmids which can be utilized for production of the desired proteins in yeast. Yeast recognizes leader sequences on cloned mammalian genes and secretes peptides bearing leader sequences (i.e., pre-peptides). Several possible vector systems are available for the expression of kinases of the invention in a mammalian host.

[0332] A wide variety of transcriptional and translational regulatory sequences may be employed, depending upon the nature of the host. The transcriptional and translational regulatory signals may be derived from viral sources, such as adenovirus, bovine papilloma virus, cytomegalovirus, simian virus, or the like, where the regulatory signals are associated with a particular gene sequence which has a high level of expression. Alternatively, promoters from mammalian expression products, such as actin, collagen, myosin, and the like, may be employed. Transcriptional initiation regulatory signals may be selected which allow for repression or activation, so that expression of the gene sequences can be modulated. Of interest are regulatory signals which are temperature-sensitive so that by varying the temperature, expression can be repressed or initiated, or are subject to chemical (such as metabolite) regulation.

[0333] Expression of kinases of the invention in eukaryotic hosts requires the use of eukaryotic regulatory regions. Such regions will, in general, include a promoter region sufficient to direct the initiation of RNA synthesis. Preferred eukaryotic promoters include, for example, the promoter of the mouse metallothionein I gene sequence (Hamer et al., J. Mol. Appl. Gen. 1:273-288, 1982); the TK promoter of Herpes virus (McKnight, Cell 31:355-365, 1982); the SV40 early promoter (Benoist et al., Nature (London) 290:304-31, 1981); and the yeast gal4 gene sequence promoter (Johnston et al., Proc. Natl. Acad. Sci. (USA) 79:6971-6975, 1982; Silver et al., Proc. Natl. Acad. Sci. (USA) 81:5951-5955, 1984).

[0334] Translation of eukaryotic mRNA is initiated at the codon which encodes the first methionine. For this reason, it is preferable to ensure that the linkage between a eukaryotic promoter and a DNA sequence which encodes a kinase of the invention (or a functional derivative thereof) does not contain any intervening codons which are capable of encoding a methionine (i.e., AUG). The presence of such codons results either in the formation of a fusion protein (if the AUG codon is in the same reading frame as the kinase of the invention coding sequence) or a frame-shift mutation (if the AUG codon is not in the same reading frame as the kinase of the invention coding sequence).

[0335] A nucleic acid molecule encoding a kinase of the invention and an operably linked promoter may be introduced into a recipient prokaryotic or eukaryotic cell either as a nonreplicating DNA or RNA molecule, which may either be a linear molecule or, more preferably, a closed covalent circular molecule. Since such molecules are incapable of autonomous replication, the expression of the gene may occur through the transient expression of the introduced sequence. Alternatively, permanent expression may occur through the integration of the introduced DNA sequence into the host chromosome.

[0336] A vector may be employed which is capable of integrating the desired gene sequences into the host cell chromosome. Cells which have stably integrated the introduced DNA into their chromosomes can be selected by also introducing one or more markers which allow for selection of host cells which contain the expression vector. The marker may provide for prototrophy to an auxotrophic host, biocide resistance, e.g., antibiotics, or heavy metals, such as copper, or the like. The selectable marker gene sequence can either be directly linked to the DNA gene sequences to be expressed, or introduced into the same cell by co-transfection. Additional elements may also be needed for optimal synthesis of mRNA. These elements may include splice signals, as well as transcription promoters, enhancers, and termination signals. cDNA expression vectors incorporating such elements include those described by Okayama (Mol. Cell. Biol. 3:280-289, 1983).

[0337] The introduced nucleic acid molecule can be incorporated into a plasmid or viral vector capable of autonomous replication in the recipient host. Any of a wide variety of vectors may be employed for this purpose. Factors of importance in selecting a particular plasmid or viral vector include: the ease with which recipient cells that contain the vector may be recognized and selected from those recipient cells which do not contain the vector; the number of copies of the vector which are desired in a particular host; and whether it is desirable to be able to “shuttle” the vector between host cells of different species.

[0338] Preferred prokaryotic vectors include plasmids such as those capable of replication in E. coli (such as, for example, pBR322, ColEl, pSC101, pACYC 184, πVX; “Molecular Cloning: A Laboratory Manual”, 1989, supra). Bacillus plasmids include pC194, pC221, pT127, and the like (Gryczan, In: The Molecular Biology of the Bacilli, Academic Press, NY, pp. 307-329, 1982). Suitable Streptomyces plasmids include p1J101 (Kendall et al., J. Bacteriol. 169:4177-4183, 1987), and streptomyces bacteriophages such as φC31 (Chater et al., In: Sixth International Symposium on Actinomycetales Biology, Akademiai Kaido, Budapest, Hungary, pp. 45-54, 1986). Pseudomonas plasmids are reviewed by John et al. (Rev. Infect. Dis. 8:693-704, 1986), and Izaki (Jpn. J. Bacteriol. 33:729-742, 1978).

[0339] Preferred eukaryotic plasmids include, for example, BPV, vaccinia, SV40, 2-micron circle, and the like, or their derivatives. Such plasmids are well known in the art (Botstein et al., Miami Wntr. Symp. 19:265-274, 1982; Broach, In: “The Molecular Biology of the Yeast Saccharomyces: Life Cycle and Inheritance”, Cold Spring Harbor Laboratory, Cold Spring Harbor, N.Y., p. 445-470, 1981; Broach, Cell 28:203-204, 1982; Bollon et al., J. Clin. Hematol. Oncol. 10:39-48, 1980; Maniatis, In: Cell Biology: A Comprehensive Treatise, Vol. 3, Gene Sequence Expression, Academic Press, NY, pp. 563-608, 1980).

[0340] Once the vector or nucleic acid molecule containing the construct(s) has been prepared for expression, the DNA construct(s) may be introduced into an appropriate host cell by any of a variety of suitable means, i.e., transformation, transfection, conjugation, protoplast fusion, electroporation, particle gun technology, calcium phosphate-precipitation, direct microinjection, and the like. After the introduction of the vector, recipient cells are grown in a selective medium, which selects for the growth of vector-containing cells. Expression of the cloned gene(s) results in the production of a kinase of the invention, or fragments thereof. This can take place in the transformed cells as such, or following the induction of these cells to differentiate (for example, by administration of bromodeoxyuracil to neuroblastoma cells or the like). A variety of incubation conditions can be used to form the peptide of the present invention. The most preferred conditions are those which mimic physiological conditions.

[0341] Transgenic Animals:

[0342] A variety of methods are available for the production of transgenic animals associated with this invention. DNA can be injected into the pronucleus of a fertilized egg before fusion of the male and female pronuclei, or injected into the nucleus of an embryonic cell (e.g., the nucleus of a two-cell embryo) following the initiation of cell division (Brinster et al., Proc. Nat. Acad. Sci. USA 82:4438-4442, 1985). Embryos can be infected with viruses, especially retroviruses, modified to carry inorganic-ion receptor nucleotide sequences of the invention.

[0343] Pluripotent stem cells derived from the inner cell mass of the embryo and stabilized in culture can be manipulated in culture to incorporate nucleotide sequences of the invention. A transgenic animal can be produced from such cells through implantation into a blastocyst that is implanted into a foster mother and allowed to come to term. Animals suitable for transgenic experiments can be obtained from standard commercial sources such as Charles River (Wilmington, Mass.), Taconic (Germantown, N.Y.), Harlan Sprague Dawley (Indianapolis, Ind.), etc.

[0344] The procedures for manipulation of the rodent embryo and for microinjection of DNA into the pronucleus of the zygote are well known to those of ordinary skill in the art (Hogan et al., supra). Microinjection procedures for fish, amphibian eggs and birds are detailed in Houdebine and Chourrout (Experientia 47:897-905, 1991). Other procedures for introduction of DNA into tissues of animals are described in U.S. Pat. No. 4,945,050 (Sanford et al., Jul. 30, 1990).

[0345] By way of example only, to prepare a transgenic mouse, female mice are induced to superovulate. Females are placed with males, and the mated females are sacrificed by CO₂ asphyxiation or cervical dislocation and embryos are recovered from excised oviducts. Surrounding cumulus cells are removed. Pronuclear embryos are then washed and stored until the time of injection. Randomly cycling adult female mice are paired with vasectomized males. Recipient females are mated at the same time as donor females. Embryos then are transferred surgically. The procedure for generating transgenic rats is similar to that of mice (Hammer et al., Cell 63:1099-1112, 1990).

[0346] Methods for the culturing of embryonic stem (ES) cells and the subsequent production of transgenic animals by the introduction of DNA into ES cells using methods such as electroporation, calcium phosphate/DNA precipitation and direct injection also are well known to those of ordinary skill in the art (Teratocarcinomas and Embryonic Stem Cells, A Practical Approach, E. J. Robertson, ed., IRL Press, 1987).

[0347] In cases involving random gene integration, a clone containing the sequence(s) of the invention is co-transfected with a gene encoding resistance. Alternatively, the gene encoding neomycin resistance is physically linked to the sequence(s) of the invention. Transfection and isolation of desired clones are carried out by any one of several methods well known to those of ordinary skill in the art (E. J. Robertson, supra).

[0348] DNA molecules introduced into ES cells can also be integrated into the chromosome through the process of homologous recombination (Capecchi, Science 244:1288-1292, 1989). Methods for positive selection of the recombination event (i.e., neo resistance) and dual positive-negative selection (i.e., neo resistance and gancyclovir resistance) and the subsequent identification of the desired clones by PCR have been described by Capecchi, supra and Joyner et al. (Nature 338:153-156, 1989), the teachings of which are incorporated herein in their entirety including any drawings. The final phase of the procedure is to inject targeted ES cells into blastocysts and to transfer the blastocysts into pseudopregnant females. The resulting chimeric animals are bred and the offspring are analyzed by Southern blotting to identify individuals that carry the transgene. Procedures for the production of non-rodent mammals and other animals have been discussed by others (Houdebine and Chourrout, supra; Pursel et al., Science 244:1281-1288, 1989; and Simms et al., Bio/Technology 6:179-183, 1988).

[0349] Thus, the invention provides transgenic, nonhuman mammals containing a transgene encoding a kinase of the invention or a gene affecting the expression of the kinase. Such transgenic nonhuman mammals are particularly useful as an in vivo test system for studying the effects of introduction of a kinase, or regulating the expression of a kinase (i.e., through the introduction of additional genes, antisense nucleic acids, or ribozymes).

[0350] A “transgenic animal” is an animal having cells that contain DNA which has been artificially inserted into a cell, which DNA becomes part of the genome of the animal which develops from that cell. Preferred transgenic animals are primates, mice, rats, cows, pigs, horses, goats, sheep, dogs and cats. The transgenic DNA may encode mammalian kinases. Native expression in an animal may be reduced by providing an amount of antisense RNA or DNA effective to reduce expression of the receptor.

[0351] Knock-Out Animals:

[0352] A “knock-out animal” is a specific type of transgenic animal having cells that contain DNA containing an alteration in the nucleic acid sequence that reduces the biological activity of the polypeptide normally encoded therefrom by at least 80% compared to the unaltered gene. The alteration may be an insertion, deletion, frameshift mutation, missense mutation, introduction of stop codons, mutation of critical amino acid residue, removal of an intron junction, and the like. Preferably, the alteration is an insertion or deletion, or is a frameshift mutation that creates a stop codon. Typically, the disruption of specific endogenous genes can be accomplished by deleting some portion of the gene or replacing it with other sequences to generate a null allele. Cross-breeding mammals having the null allele generates a homozygous mammals lacking an active copy of the gene.

[0353] A number of such mammals have been developed, and are extremely helpful in medical development. For example, U.S. Pat. No. 5,616,491 describes knock-out mice having suppression of CD28 and CD45. Procedures for preparation and manipulation of cells and embryos are similar to those described above with respect to transgenic animals, and are well known to those of ordinary skill in the art.

[0354] A knock out construct refers to a uniquely configured fragment of nucleic acid which is introduced into a stem cell line and allowed to recombine with the genome at the chromosomal locus of the gene of interest to be mutated. Thus, a given knock out construct is specific for a given gene to be targeted for disruption. Nonetheless, many common elements exist among these constructs and these elements are well known in the art. A typical knock out construct contains nucleic acid fragments of about 0.5 kb to about 10.0 kb from both the 5′ and the 3′ ends of the genomic locus which encodes the gene to be mutated. These two fragments are typically separated by an intervening fragment of nucleic acid which encodes a positive selectable marker, such as the neomycin resistance gene. The resulting nucleic acid fragment, consisting of a nucleic acid from the extreme 5′ end of the genomic locus linked to a nucleic acid encoding a positive selectable marker which is in turn linked to a nucleic acid from the extreme 3′ end of the genomic locus of interest, omits most of the coding sequence for the gene of interest to be knocked out. When the resulting construct recombines homologously with the chromosome at this locus, it results in the loss of the omitted coding sequence, otherwise known as the structural gene, from the genomic locus. A stem cell in which such a rare homologous recombination event has taken place can be selected for by virtue of the stable integration into the genome of the nucleic acid of the gene encoding the positive selectable marker and subsequent selection for cells expressing this marker gene in the presence of an appropriate drug.

[0355] Variations on this basic technique also exist and are well known in the art. For example, a “knock-in” construct refers to the same basic arrangement of a nucleic acid encoding a 5′ genomic locus fragment linked to nucleic acid encoding a positive selectable marker which in turn is linked to a nucleic acid encoding a 3′ genomic locus fragment, but which differs in that none of the coding sequence is omitted and thus the 5′ and the 3′ genomic fragments used were initially contiguous before being disrupted by the introduction of the nucleic acid encoding the positive selectable marker gene. This “knock-in” type of construct is thus very useful for the construction of mutant transgenic animals when only a limited region of the genomic locus of the gene to be mutated, such as a single exon, is available for cloning and genetic manipulation. Alternatively, the “knock-in” construct can be used to specifically eliminate a single functional domain of the targeted gene, resulting in a transgenic animal which expresses a polypeptide of the targeted gene which is defective in one function, while retaining the function of other domains of the encoded polypeptide. This type of “knock-in” mutant frequently has the characteristic of a so-called “dominant negative” mutant because, especially in the case of proteins which homomultimerize, it can specifically block the action of the polypeptide product of the wild-type gene from which it was derived.

[0356] Each knockout construct to be inserted into the cell must first be in the linear form. Therefore, if the knockout construct has been inserted into a vector, linearization is accomplished by digesting the DNA with a suitable restriction endonuclease selected to cut only within the vector sequence and not within the knockout construct sequence. For insertion, the knockout construct is added to the ES cells under appropriate conditions for the insertion method chosen, as is known to the skilled artisan. Where more than one construct is to be introduced into the ES cell, each knockout construct can be introduced simultaneously or one at a time.

[0357] After suitable ES cells containing the knockout construct in the proper location have been identified by the selection techniques outlined above, the cells can be inserted into an embryo. Insertion may be accomplished in a variety of ways known to the skilled artisan, however a preferred method is by microinjection. For microinjection, about 10-30 cells are collected into a micropipette and injected into embryos that are at the proper stage of development to permit integration of the foreign ES cell containing the knockout construct into the developing embryo. For instance, the transformed ES cells can be microinjected into blastocytes. The suitable stage of development for the embryo used for insertion of ES cells is very species dependent, however for mice it is about 3.5 days. The embryos are obtained by perfusing the uterus of pregnant females. Suitable methods for accomplishing this are known to the skilled artisan. After the ES cell has been introduced into the embryo, the embryo may be implanted into the uterus of a pseudopregnant foster mother for gestation as described above.

[0358] Yet other methods of making knock-out or disruption transgenic animals are also generally known. See, for example, Manipulating the Mouse Embryo, (Cold Spring Harbor Laboratory Press, Cold Spring Harbor, N.Y., 1986). Recombinase dependent knockouts can also be generated, e.g. by homologous recombination to insert target sequences, such that tissue specific and/or temporal control of inactivation of a target gene can be controlled by recombinase sequences (described infra).

[0359] Animals containing more than one knockout construct and/or more than one transgene expression construct are prepared in any of several ways. The preferred manner of preparation is to generate a series of mammals, each containing one of the desired transgenic phenotypes. Such animals are bred together through a series of crosses, backcrosses and selections, to ultimately generate a single animal containing all desired knockout constructs and/or expression constructs, where the animal is otherwise congenic (genetically identical) to the wild type except for the presence of the knockout construct(s) and/or transgene(s).

[0360] Uses of Transgenic and Knock-Out Animals:

[0361] The transgenic and knock-out animals of the present invention, or cells or cell lines obtained from such animals, can be used to identify substances that bind to and/or modulate the activity of a kinase polypeptide. A wide variety of assays may be used for this purpose, including screening assays, labeled in vitro protein-protein binding assays, protein-DNA binding assays, electrophoretic mobility shift assays, immunoassays for protein binding, kinase activity assays, and the like. Cells may be freshly isolated from an animal, or may be immortalized in culture as cell lines.

[0362] Test substances encompass numerous chemical classes, though typically they are organic molecules, preferably small compounds having a molecular weight of more than 50 and less than about 2,500 daltons. Test substances comprise functional groups necessary for structural interaction with proteins, particularly hydrogen bonding, and typically include at least an amine, carbonyl, hydroxyl or carboxyl group, preferably at least two of the functional chemical groups. The candidate agents often comprise cyclical carbon or heterocyclic structures and/or aromatic or polyaromatic structures substituted with one or more of the above functional groups.

[0363] In alternative embodiments, test substances may also include biomolecules including, but not limited to: peptides, polypeptides, proteins, saccharides, fatty acids, steroids, purines, pyrimidines, derivatives, structural analogs or combinations thereof.

[0364] Test substances may be obtained from a wide variety of sources including libraries of synthetic or natural compounds. For example, numerous means are available for random and directed synthesis of a wide variety of organic compounds and biomolecules, including expression of randomized oligonucleotides and oligopeptides. Alternatively, libraries of natural compounds in the form of bacterial, fungal, plant and animal extracts are available or readily produced. Additionally, natural or synthetically produced libraries and compounds are readily modified through conventional chemical, physical and biochemical means, and may be used to produce combinatorial libraries. Known pharmacological agents may be subjected to directed or random chemical modifications, such as acylation, alkylation, esterification, amidification, etc. to produce structural analogs.

[0365] Where the screening assay is a binding assay, one or more of the molecules may be joined to a label, where the label can directly or indirectly provide a detectable signal. Various labels include radioisotopes, fluorescers, chemiluminescers, enzymes, specific binding molecules, particles, e.g., magnetic particles, and the like. Specific binding molecules include pairs, such as biotin and streptavidin, digoxin and antidigoxin etc. For the specific binding members, the complementary member would normally be labeled with a molecule that provides for detection, in accordance with known procedures.

[0366] Antibodies disclosed herein may also be used in screening immunoassays, particularly to detect the binding of substrates to kinase polypeptides, or to confirm the presence and/or quantity of a kinase polypeptide in a cell or sample.

[0367] Samples obtained from transgenic mice or knock-out mice, as used herein, include biological fluids such as tracheal lavage, blood, cerebrospinal fluid, tears, saliva, lymph, dialysis fluid and the like; organ or tissue culture derived fluids; fluids extracted from physiological tissues; tissue and cells, or homogenates thereof. Also included in the term are derivatives and fractions of any of these types of samples.

[0368] Substances identified as modulators of kinase activity identified using invention transgenic or knock-out mice can be used for treating a disease or disorder by administering such as substance to a patient in need thereof. In addition, such substances identified in murine systems can be used to determine their effect on human orthologues of murine polypeptides. Human orthologues may be identified by hybridization of probes described herein obtained from nucleic acid sequences encoding the amino acid sequence of any of SEQ ID NOs:115 through 228.

[0369] Gene Therapy:

[0370] Kinases or their genetic sequences will also be useful in gene therapy (reviewed in Miller, Nature 357:455-460, 1992). Miller states that advances have resulted in practical approaches to human gene therapy that have demonstrated positive initial results. The basic science of gene therapy is described in Mulligan (Science 260:926-931, 1993).

[0371] In one preferred embodiment, an expression vector containing a kinase coding sequence is inserted into cells, the cells are grown in vitro and then infused in large numbers into patients. In another preferred embodiment, a DNA segment containing a promoter of choice (for example a strong promoter) is transferred into cells containing an endogenous gene encoding kinases of the invention in such a manner that the promoter segment enhances expression of the endogenous kinase gene (for example, the promoter segment is transferred to the cell such that it becomes directly linked to the endogenous kinase gene).

[0372] The gene therapy may involve the use of an adenovirus containing kinase cDNA targeted to a tumor, systemic kinase increase by implantation of engineered cells, injection with kinase-encoding virus, or injection of naked kinase DNA into appropriate tissues.

[0373] Target cell populations may be modified by introducing altered forms of one or more components of the protein complexes in order to modulate the activity of such complexes. For example, by reducing or inhibiting a complex component activity within target cells, an abnormal signal transduction event(s) leading to a condition may be decreased, inhibited, or reversed. Deletion or missense mutants of a component, that retain the ability to interact with other components of the protein complexes but cannot function in signal transduction, may be used to inhibit an abnormal, deleterious signal transduction event.

[0374] Expression vectors derived from viruses such as retroviruses, vaccinia virus, adenovirus, adeno-associated virus, herpes viruses, several RNA viruses, or bovine papilloma virus, may be used for delivery of nucleotide sequences (e.g., cDNA) encod-ing recombinant kinase of the invention protein into the targeted cell population (e.g., tumor cells). Methods which are well known to those skilled in the art can be used to construct recombinant viral vectors containing coding sequences (Maniatis et al., Molecular Cloning: A Laboratory Manual, Cold Spring Harbor Laboratory, N.Y., 1989; Ausubel et al., Current Proto-cols in Molecular Biology, Greene Publishing Associates and Wiley Interscience, N.Y., 1989). Alter-natively, recombinant nucleic acid molecules encoding protein sequences can be used as naked DNA or in a recon-stituted system e.g., liposomes or other lipid systems for delivery to target cells (e.g., Felgner et al., Nature 337:387-8, 1989). Several other methods for the direct transfer of plasmid DNA into cells exist for use in human gene therapy and involve targeting the DNA to receptors on cells by complexing the plasmid DNA to proteins (Miller, supra).

[0375] In its simplest form, gene transfer can be performed by simply injecting minute amounts of DNA into the nucleus of a cell, through a process of microinjection (Capecchi, Cell 22:479-88, 1980). Once recombinant genes are introduced into a cell, they can be recognized by the cell's normal mechanisms for transcription and translation, and a gene product will be expressed. Other methods have also been attempted for introducing DNA into larger numbers of cells. These methods include: transfection, wherein DNA is precipitated with calcium phosphate and taken into cells by pinocytosis (Chen et al., Mol. Cell Biol. 7:2745-52, 1987); electroporation, wherein cells are exposed to large voltage pulses to introduce holes into the membrane (Chu et al., Nucleic Acids Res. 15:1311-26, 1987); lipofection/liposome fusion, wherein DNA is packaged into lipophilic vesicles which fuse with a target cell (Felgner et al., Proc. Natl. Acad. Sci. USA. 84:7413-7417, 1987); and particle bombardment using DNA bound to small projectiles (Yang et al., Proc. Natl. Acad. Sci. 87:9568-9572, 1990). Another method for introducing DNA into cells is to couple the DNA to chemically modified proteins.

[0376] It has also been shown that adenovirus proteins are capable of destabilizing endosomes and enhancing the uptake of DNA into cells. The admixture of adenovirus to solutions containing DNA complexes, or the binding of DNA to polylysine covalently attached to adenovirus using protein crosslinking agents substantially improves the uptake and expression of the recombinant gene (Curiel et al., Am. J. Respir. Cell. Mol. Biol., 6:247-52, 1992).

[0377] As used herein “gene transfer” means the process of introducing a foreign nucleic acid molecule into a cell. Gene transfer is commonly performed to enable the expression of a particular product encoded by the gene. The product may include a protein, polypeptide, antisense DNA or RNA, or enzymatically active RNA. Gene transfer can be performed in cultured cells or by direct administration into animals. Generally gene transfer involves the process of nucleic acid contact with a target cell by non-specific or receptor mediated interactions, uptake of nucleic acid into the cell through the membrane or by endocytosis, and release of nucleic acid into the cyto-plasm from the plasma membrane or endosome. Expression may require, in addition, movement of the nucleic acid into the nucleus of the cell and binding to appropriate nuclear factors for transcription.

[0378] As used herein “gene therapy” is a form of gene transfer and is included within the definition of gene transfer as used herein and specifically refers to gene transfer to express a therapeutic product from a cell in vivo or in vitro. Gene transfer can be performed ex vivo on cells which are then transplanted into a patient, or can be performed by direct administration of the nucleic acid or nucleic acid-protein complex into the patient.

[0379] In another preferred embodiment, a vector having nucleic acid sequences encoding a kinase polypeptide is provided in which the nucleic acid sequence is expressed only in specific tissue. Methods of achieving tissue-specific gene expression are set forth in International Publication No. WO 93/09236, filed Nov. 3, 1992 and published May 13, 1993.

[0380] In all of the preceding vectors set forth above, a further aspect of the invention is that the nucleic acid sequence contained in the vector may include additions, deletions or modifications to some or all of the sequence of the nucleic acid, as defined above.

[0381] Expression, including over-expression, of a kinase polypeptide of the invention can be inhibited by administration of an antisense molecule that binds to and inhibits expression of the mRNA encoding the polypeptide. Alternatively, expression can be inhibited in an analogous manner using a ribozyme that cleaves the mRNA. General methods of using antisense and ribozyme technology to control gene expression, or of gene therapy methods for expression of an exogenous gene in this manner are well known in the art. Each of these methods utilizes a system, such as a vector, encoding either an antisense or ribozyme transcript of a kinase polypeptide of the invention.

[0382] The term “ribozyme” refers to an RNA structure of one or more RNAs having catalytic properties. Ribozymes generally exhibit endonuclease, ligase or polymerase activity. Ribozymes are structural RNA molecules which mediate a number of RNA self-cleavage reactions. Various types of trans-acting ribozymes, including “hammerhead” and “hairpin” types, which have different secondary structures, have been identified. A variety of ribozymes have been characterized. See, for example, U.S. Pat. Nos. 5,246,921, 5,225,347, 5,225,337 and 5,149,796. Mixed ribozymes comprising deoxyribo and ribooligonucleotides with catalytic activity have been described. Perreault, et al., Nature, 344:565-567 (1990).

[0383] As used herein, “antisense” refers of nucleic acid molecules or their derivatives which specifically hybridize, e.g., bind, under cellular conditions, with the genomic DNA and/or cellular mRNA encoding a kinase polypeptide of the invention, so as to inhibit expression of that protein, for example, by inhibiting transcription and/or translation. The binding may be by conventional base pair complementarity, or, for example, in the case of binding to DNA duplexes, through specific interactions in the major groove of the double helix.

[0384] In one aspect, the antisense construct is an nucleic acid which is generated ex vivo and that, when introduced into the cell, can inhibit gene expression by, without limitation, hybridizing with the mRNA and/or genomic sequences of a kinase polynucleotide of the invention.

[0385] Antisense approaches can involve the design of oligonucleotides (either DNA or RNA) that are complementary to kinase polypeptide mRNA and are based on the kinase polynucleotides of the invention, including SEQ ID NO:1 through 66. The antisense oligonucleotides will bind to the kinase polypeptide mRNA transcripts and prevent translation.

[0386] Although absolute complementarity is preferred, it is not required. A sequence “complementary” to a portion of an RNA, as referred to herein, means a sequence having sufficient complementarity to be able to hybridize with the RNA, forming a stable duplex; in the case of double-stranded antisense nucleic acids, a single strand of the duplex DNA may thus be tested, or triplex formation may be assayed. The ability to hybridize will depend on both the degree of complementarity and the length of the antisense nucleic acid. Generally, the longer the hybridizing nucleic acid, the more base mismatches with an RNA it may contain and still form a stable duplex (or triplex, as the case may be). One skilled in the art can ascertain a tolerable degree of mismatch by use of standard procedures to determine the melting point of the hybridized complex.

[0387] General methods of using antisense, ribozyme technology and RNAi technology, to control gene expression, or of gene therapy methods for expression of an exogenous gene in this manner are well known in the art. Each of these methods utilizes a system, such as a vector, encoding either an antisense or ribozyme transcript of a phosphatase polypeptide of the invention. The term “RNAi” stands for RNA interference. This term is understood in the art to encompass technology using RNA molecules that can silence genes. See, for example, McManus, et al. Nature Reviews Genetics 3:737 (2002). In this application, the term “RNAi” encompasses molecules such as short interfering RNA (siRNA), microRNAs (mRNA), small temporal RNA (stRNA). Generally speaking, RNA interference results from the interaction of double-stranded RNA with genes.

[0388] In general, oligonucleotides that are complementary to the 5′ end of the message, e.g., the 5′ untranslated sequence up to and including the AUG initiation codon, should work most efficiently at inhibiting translation. However, sequences complementary to the 3′ untranslated sequences of mRNAs have been shown to be effective at inhibiting translation of mRNAs as well. (Wagner, R. (1994) Nature 372:333). Antisense oligonucleotides complementary to mRNA coding regions are less efficient inhibitors of translation but could be used in accordance with the invention. Whether designed to hybridize to the 5′, 3′ or coding region of the kinase polypeptide mRNA, antisense nucleic acids should be at least six nucleotides in length, and are preferably less than about 100 and more preferably less than about 50 or 30 nucleotides in length. Typically they should be between 10 and 25 nucleotides in length. Such principles will inform the practitioner in selecting the appropriate oligonucleotides In preferred embodiments, the antisense sequence is selected from an oligonucleotide sequence that comprises, consists of, or consists essentially of about 10-30, and more preferably 15-25, contiguous nucleotide bases of a nucleic acid sequence selected from the group consisting of SEQ ID NO:1 through 114 or domains thereof.

[0389] In another preferred embodiment, the invention includes an isolated, enriched or purified nucleic acid molecule comprising, consisting of or consisting essentially of about 10-30, and more preferably 15-25 contiguous nucleotide bases of a nucleic acid sequence that encodes a polypeptide of SEQ ID NO:115 through SEQ ID NO:228.

[0390] Using the sequences of the present invention, antisense oligonucleotides can be designed. Such antisense oligonucleotides would be administered to cells expressing the target kinase and the levels of the target RNA or protein with that of an internal control RNA or protein would be compared. Results obtained using the antisense oligonucleotide would also be compared with those obtained using a suitable control oligonucleotide. A preferred control oligonucleotide is an oligonucleotide of approximately the same length as the test oligonucleotide. Those antisense oligonucleotides resulting in a reduction in levels of target RNA or protein would be selected.

[0391] The oligonucleotides can be DNA or RNA or chimeric mixtures or derivatives or modified versions thereof, single-stranded or double-stranded. The oligonucleotide can be modified at the base moiety, sugar moiety, or phosphate backbone, for example, to improve stability of the molecule, hybridization, etc. The oligonucleotide may include other appended groups such as peptides (e.g., for targeting host cell receptors in vivo), or agents facilitating transport across the cell membrane (see, e.g., Letsinger et al. (1989) Proc. Natl. Acad. Sci. U.S.A. 86:6553-6556; Lemaitre et al. (1987) Proc. Natl. Acad. Sci. USA 84:648-652; PCT Publication No. WO 88/09810, published Dec. 15, 1988) or the blood-brain barrier (see, e.g., PCT Publication No. WO 89/10134, published Apr. 25, 1988), hybridization-triggered cleavage agents. (See, e.g., Krol et al. (1988) BioTechniques 6:958-976) or intercalating agents. (See, e.g, Zon (1988) Pharm. Res. 5:539-549). To this end, the oligonucleotide may be conjugated to another molecule, e.g., a peptide, hybridization triggered cross-linking agent, transport agent, hybridization-triggered cleavage agent, etc.

[0392] The antisense oligonucleotide may comprise at least one modified base moiety which is selected from moieties such as 5-fluorouracil, 5-bromouracil, 5-chlorouracil, 5-iodouracil, hypoxanthine, xanthine, 4-acetylcytosine, and 5-(carboxyhydroxyethyl) uracil. The antisense oligonucleotide may also comprise at least one modified sugar moiety selected from the group including but not limited to arabinose, 2-fluoroarabinose, xylulose, and hexose.

[0393] In yet another embodiment, the antisense oligonucleotide comprises at least one modified phosphate backbone selected from the group consisting of a phosphorothioate, a phosphorodithioate, a phosphoramidothioate, a phosphoramidate, a phosphordiamidate, a methylphosphonate, an alkyl phosphotriester, and a formacetal or analog thereof. (see also U.S. Pat. Nos. 5,176,996; 5,264,564; and 5,256,775).

[0394] In yet a further embodiment, the antisense oligonucleotide is an α-anomeric oligonucleotide. An α-anomeric oligonucleotide forms specific double-stranded hybrids with complementary RNA in which, contrary to the usual β-units, the strands run parallel to each other (Gautier et al. (1987) Nucl. Acids Res. 15:6625-6641). The oligonucleotide is a 2′-0-methylribonucleotide (Inoue et al. (1987) Nucl. Acids Res. 15:6131-6148), or a chimeric RNA-DNA analogue (Inoue et al. (1987) FEBS Lett. 215:327-330).

[0395] Also suitable are peptidyl nucleic acids, which are polypeptides such as polyserine, polythreonine, etc. including copolymers containing various amino acids, which are substituted at side-chain positions with nucleic acids (T,A,G,C,U). Chains of such polymers are able to hybridize through complementary bases in the same manner as natural DNA/RNA. Alternatively, an antisense construct of the present invention can be delivered, for example, as an expression plasmid or vector that, when transcribed in the cell, produces RNA complementary to at least a unique portion of the cellular mRNA which encodes a kinase polypeptide of the invention.

[0396] While antisense nucleotides complementary to the kinase polypeptide coding region sequence can be used, those complementary to the transcribed untranslated region are most preferred.

[0397] In another preferred embodiment, a method of gene replacement is set forth. “Gene replacement” as used herein means supplying a nucleic acid sequence which is capable of being expressed in vivo in an animal and thereby providing or augmenting the function of an endogenous gene which is missing or defective in the animal.

[0398] Pharmaceutical Formulations and Routes of Administration

[0399] The compounds described herein, including kinase polypeptides of the invention, antisense molecules, ribozymes, and any other compound that modulates the activity of a kinase polypeptide of the invention, can be administered to a human patient per se, or in pharmaceutical compositions where it is mixed with other active ingredients, as in combination therapy, or suitable carriers or excipient(s). Techniques for formulation and administration of the compounds of the instant application may be found in “Remington's Pharmaceutical Sciences,” Mack Publishing Co., Easton, Pa., latest edition.

[0400] Routes Of Administration:

[0401] Suitable routes of administration may, for example, include oral, rectal, transmucosal, or intestinal administration; parenteral delivery, including intramuscular, subcutaneous, intravenous, intramedullary injections, as well as intrathecal, direct intraventricular, intraperitoneal, intranasal, or intraocular injections.

[0402] Alternately, one may administer the compound in a local rather than systemic manner, for example, via injection of the compound directly into a solid tumor, often in a depot or sustained release formulation.

[0403] Furthermore, one may administer the drug in a targeted drug delivery system, for example, in a liposome coated with tumor-specific antibody. The liposomes will be targeted to and taken up selectively by the tumor.

[0404] Composition/Formulation:

[0405] The pharmaceutical compositions of the present invention may be manufactured in a manner that is itself known, e.g., by means of conventional mixing, dissolving, granulating, dragee-making, levigating, emulsifying, encapsulating, entrapping or lyophilizing processes.

[0406] Pharmaceutical compositions for use in accordance with the present invention thus may be formulated in conventional manner using one or more physiologically acceptable carriers comprising excipients and auxiliaries which facilitate processing of the active compounds into preparations which can be used pharmaceutically. Proper formulation is dependent upon the route of administration chosen.

[0407] For injection, the agents of the invention may be formulated in aqueous solutions, preferably in physiologically compatible buffers such as Hanks's solution, Ringer's solution, or physiological saline buffer. For transmucosal administration, penetrants appropriate to the barrier to be permeated are used in the formulation. Such penetrants are generally known in the art.

[0408] For oral administration, the compounds can be formulated readily by combining the active compounds with pharmaceutically acceptable carriers well known in the art. Such carriers enable the compounds of the invention to be formulated as tablets, pills, dragees, capsules, liquids, gels, syrups, slurries, suspensions and the like, for oral ingestion by a patient to be treated. Suitable carriers include excipients such as, fillers such as sugars, including lactose, sucrose, mannitol, or sorbitol; cellulose preparations such as, for example, maize starch, wheat starch, rice starch, potato starch, gelatin, gum tragacanth, methyl cellulose, hydroxypropylmethyl-cellulose, sodium carboxymethylcellulose, and/or polyvinylpyrrolidone (PVP). If desired, disintegrating agents may be added, such as the cross-linked polyvinyl pyrrolidone, agar, or alginic acid or a salt thereof such as sodium alginate.

[0409] Dragee cores are provided with suitable coatings. For this purpose, concentrated sugar solutions may be used, which may optionally contain gum arabic, talc, polyvinyl pyrrolidone, carbopol gel, polyethylene glycol, and/or titanium dioxide, lacquer solutions, and suitable organic solvents or solvent mixtures. Dyestuffs or pigments may be added to the tablets or dragee coatings for identification or to characterize different combinations of active compound doses.

[0410] Pharmaceutical preparations which can be used orally include push-fit capsules made of gelatin, as well as soft, sealed capsules made of gelatin and a plasticizer, such as glycerol or sorbitol. The push-fit capsules can contain the active ingredients in admixture with filler such as lactose, binders such as starches, and/or lubricants such as talc or magnesium stearate and, optionally, stabilizers. In soft capsules, the active compounds may be dissolved or suspended in suitable liquids, such as fatty oils, liquid paraffin, or liquid polyethylene glycols. In addition, stabilizers may be added. All formulations for oral administration should be in dosages suitable for such administration.

[0411] For buccal administration, the compositions may take the form of tablets or lozenges formulated in conventional manner.

[0412] For administration by inhalation, the compounds for use according to the present invention are conveniently delivered in the form of an aerosol spray presentation from pressurized packs or a nebuliser, with the use of a suitable propellant, e.g., dichlorodifluoromethane, trichlorofluoromethane, dichlorotetrafluoroethane, carbon dioxide or other suitable gas. In the case of a pressurized aerosol the dosage unit may be determined by providing a valve to deliver a metered amount. Capsules and cartridges of e.g. gelatin for use in an inhaler or insufflator may be formulated containing a powder mix of the compound and a suitable powder base such as lactose or starch.

[0413] The compounds may be formulated for parenteral administration by injection, e.g., by bolus injection or continuous infusion. Formulations for injection may be presented in unit dosage form, e.g., in ampoules or in multi-dose containers, with an added preservative. The compositions may take such forms as suspensions, solutions or emulsions in oily or aqueous vehicles, and may contain formulatory agents such as suspending, stabilizing and/or dispersing agents.

[0414] Pharmaceutical formulations for parenteral administration include aqueous solutions of the active compounds in water-soluble form. Additionally, suspensions of the active compounds may be prepared as appropriate oily injection suspensions. Suitable lipophilic solvents or vehicles include fatty oils such as sesame oil, or synthetic fatty acid esters, such as ethyl oleate or triglycerides, or liposomes. Aqueous injection suspensions may contain substances which increase the viscosity of the suspension, such as sodium carboxymethyl cellulose, sorbitol, or dextran. Optionally, the suspension may also contain suitable stabilizers or agents which increase the solubility of the compounds to allow for the preparation of highly concentrated solutions.

[0415] Alternatively, the active ingredient may be in powder form for constitution with a suitable vehicle, e.g., sterile pyrogen-free water, before use.

[0416] The compounds may also be formulated in rectal compositions such as suppositories or retention enemas, e.g., containing conventional suppository bases such as cocoa butter or other glycerides.

[0417] In addition to the formulations described previously, the compounds may also be formulated as a depot preparation. Such long acting formulations may be administered by implantation (for example subcutaneously or intramuscularly) or by intramuscular injection. Thus, for example, the compounds may be formulated with suitable polymeric or hydrophobic materials (for example as an emulsion in an acceptable oil) or ion exchange resins, or as sparingly soluble derivatives, for example, as a sparingly soluble salt.

[0418] A pharmaceutical carrier for the hydrophobic compounds of the invention is a cosolvent system comprising benzyl alcohol, a nonpolar surfactant, a water-miscible organic polymer, and an aqueous phase. The cosolvent system may be the VPD co-solvent system. VPD is a solution of 3% w/v benzyl alcohol, 8% w/v of the nonpolar surfactant polysorbate 80, and 65% w/v polyethylene glycol 300, made up to volume in absolute ethanol. The VPD co-solvent system (VPD:D5W) consists of VPD diluted 1:1 with a 5% dextrose in water solution. This co-solvent system dissolves hydrophobic compounds well, and itself produces low toxicity upon systemic administration. Naturally, the proportions of a co-solvent system may be varied considerably without destroying its solubility and toxicity characteristics. Furthermore, the identity of the co-solvent components may be varied: for example, other low-toxicity nonpolar surfactants may be used instead of polysorbate 80; the fraction size of polyethylene glycol may be varied; other biocompatible polymers may replace polyethylene glycol, e.g. polyvinyl pyrrolidone; and other sugars or polysaccharides may substitute for dextrose.

[0419] Alternatively, other delivery systems for hydrophobic pharmaceutical compounds may be employed. Liposomes and emulsions are well known examples of delivery vehicles or carriers for hydrophobic drugs. Certain organic solvents such as dimethylsulfoxide also may be employed, although usually at the cost of greater toxicity. Additionally, the compounds may be delivered using a sustained-release system, such as semipermeable matrices of solid hydrophobic polymers containing the therapeutic agent. Various sustained-release materials have been established and are well known by those skilled in the art. Sustained-release capsules may, depending on their chemical nature, release the compounds for a few weeks up to over 100 days. Depending on the chemical nature and the biological stability of the therapeutic reagent, additional strategies for protein stabilization may be employed.

[0420] The pharmaceutical compositions also may comprise suitable solid or gel phase carriers or excipients. Examples of such carriers or excipients include but are not limited to calcium carbonate, calcium phosphate, various sugars, starches, cellulose derivatives, gelatin, and polymers such as polyethylene glycols.

[0421] Many of the tyrosine or serine/threonine kinase modulating compounds of the invention may be provided as salts with pharmaceutically compatible counterions. Pharmaceutically compatible salts may be formed with many acids, including but not limited to hydrochloric, sulfuric, acetic, lactic, tartaric, malic, succinic, etc. Salts tend to be more soluble in aqueous or other protonic solvents that are the corresponding free base forms.

[0422] Suitable Dosage Regimens:

[0423] Pharmaceutical compositions suitable for use in the present invention include compositions where the active ingredients are contained in an amount effective to achieve its intended purpose. More specifically, a therapeutically effective amount means an amount of compound effective to prevent, alleviate or ameliorate symptoms of disease or prolong the survival of the subject being treated. Determination of a therapeutically effective amount is well within the capability of those skilled in the art, especially in light of the detailed disclosure provided herein.

[0424] Methods of determining the dosages of compounds to be administered to a patient and modes of administering compounds to an organism are disclosed in U.S. application Ser. No. 08/702,282, filed Aug. 23, 1996 and International patent publication number WO 96/22976, published Aug. 1, 1996, both of which are incorporated herein by reference in their entirety, including any drawings, figures or tables. Those skilled in the art will appreciate that such descriptions are applicable to the present invention and can be easily adapted to it.

[0425] The proper dosage depends on various factors such as the type of disease being treated, the particular composition being used and the size and physiological condition of the patient. Therapeutically effective doses for the compounds described herein can be estimated initially from cell culture and animal models. For example, a dose can be formulated in animal models to achieve a circulating concentration range that initially takes into account the IC₅₀ as determined in cell culture assays. The animal model data can be used to more accurately determine useful doses in humans.

[0426] For any compound used in the methods of the invention, the therapeutically effective dose can be estimated initially from cell culture assays. For example, a dose can be formulated in animal models to achieve a circulating concentration range that includes the IC₅₀ as determined in cell culture (i.e., the concentration of the test compound which achieves a half-maximal inhibition of the tyrosine or serine/threonine kinase activity). Such information can be used to more accurately determine useful doses in humans.

[0427] Toxicity and therapeutic efficacy of the compounds described herein can be determined by standard pharmaceutical procedures in cell cultures or experimental animals, e.g., for determining the LD₅₀ (the dose lethal to 50% of the population) and the ED₅₀ (the dose therapeutically effective in 50% of the population). The dose ratio between toxic and therapeutic effects is the therapeutic index and it can be expressed as the ratio between LD₅₀ and ED₅₀. Compounds which exhibit high therapeutic indices are preferred. The data obtained from these cell culture assays and animal studies can be used in formulating a range of dosage for use in human. The dosage of such compounds lies preferably within a range of circulating concentrations that include the ED₅₀ with little or no toxicity. The dosage may vary within this range depending upon the dosage form employed and the route of administration utilized. The exact formulation, route of administration and dosage can be chosen by the individual physician in view of the patient's condition. (See e.g., Fingl et al., 1975, in “The Pharmacological Basis of Therapeutics”, Ch. 1 p. 1).

[0428] In another example, toxicity studies can be carried out by measuring the blood cell composition. For example, toxicity studies can be carried out in a suitable animal model as follows: 1) the compound is administered to mice (an untreated control mouse should also be used); 2) blood samples are periodically obtained via the tail vein from one mouse in each treatment group; and 3) the samples are analyzed for red and white blood cell counts, blood cell composition and the percent of lymphocytes versus polymorphonuclear cells. A comparison of results for each dosing regime with the controls indicates if toxicity is present.

[0429] At the termination of each toxicity study, further studies can be carried out by sacrificing the animals (preferably, in accordance with the American Veterinary Medical Association guidelines Report of the American Veterinary Medical Assoc. Panel on Euthanasia:229-249, 1993). Representative animals from each treatment group can then be examined by gross necropsy for immediate evidence of metastasis, unusual illness or toxicity. Gross abnormalities in tissue are noted and tissues are examined histologically. Compounds causing a reduction in body weight or blood components are less preferred, as are compounds having an adverse effect on major organs. In general, the greater the adverse effect the less preferred the compound.

[0430] For the treatment of cancers the expected daily dose of a hydrophobic pharmaceutical agent is between 1 to 500 mg/day, preferably 1 to 250 mg/day, and most preferably 1 to 50 mg/day. Drugs can be delivered less frequently provided plasma levels of the active moiety are sufficient to maintain therapeutic effectiveness.

[0431] Plasma levels should reflect the potency of the drug. Generally, the more potent the compound the lower the plasma levels necessary to achieve efficacy.

[0432] Plasma half-life and biodistribution of the drug and metabolites in the plasma, tumors and major organs can also be determined to facilitate the selection of drugs most appropriate to inhibit a disorder. Such measurements can be carried out. For example, HPLC analysis can be performed on the plasma of animals treated with the drug and the location of radiolabeled compounds can be determined using detection methods such as X-ray, CAT scan and MRI. Compounds that show potent inhibitory activity in the screening assays, but have poor pharmacokinetic characteristics, can be optimized by altering the chemical structure and retesting. In this regard, compounds displaying good pharmacokinetic characteristics can be used as a model.

[0433] Dosage amount and interval may be adjusted individually to provide plasma levels of the active moiety which are sufficient to maintain the kinase modulating effects, or minimal effective concentration (MEC). The MEC will vary for each compound but can be estimated from in vitro data; e.g., the concentration necessary to achieve 50-90% inhibition of the kinase using the assays described herein. Dosages necessary to achieve the MEC will depend on individual characteristics and route of administration. However, HPLC assays or bioassays can be used to determine plasma concentrations.

[0434] Dosage intervals can also be determined using MEC value. Compounds should be administered using a regimen which maintains plasma levels above the MEC for 10-90% of the time, preferably between 30-90% and most preferably between 50-90%.

[0435] In cases of local administration or selective uptake, the effective local concentration of the drug may not be related to plasma concentration.

[0436] The amount of composition administered will, of course, be dependent on the subject being treated, on the subject's weight, the severity of the affliction, the manner of administration and the judgment of the prescribing physician.

[0437] Packaging:

[0438] The compositions may, if desired, be presented in a pack or dispenser device which may contain one or more unit dosage forms containing the active ingredient. The pack may for example comprise metal or plastic foil, such as a blister pack. The pack or dispenser device may be accompanied by instructions for administration. The pack or dispenser may also be accompanied with a notice associated with the container in form prescribed by a governmental agency regulating the manufacture, use, or sale of pharmaceuticals, which notice is reflective of approval by the agency of the form of the polynucleotide for human or veterinary administration. Such notice, for example, may be the labeling approved by the U.S. Food and Drug Administration for prescription drugs, or the approved product insert. Compositions comprising a compound of the invention formulated in a compatible pharmaceutical carrier may also be prepared, placed in an appropriate container, and labeled for treatment of an indicated condition. Suitable conditions indicated on the label may include treatment of a tumor, inhibition of angiogenesis, treatment of fibrosis, diabetes, and the like.

[0439] Functional Derivatives

[0440] Also provided herein are functional derivatives of a polypeptide or nucleic acid of the invention. By “functional derivative” is meant a “chemical derivative,” “fragment,” or “variant,” of the polypeptide or nucleic acid of the invention, which terms are defined below. A functional derivative retains at least a portion of the function of the protein, for example reactivity with an antibody specific for the protein, enzymatic activity or binding activity mediated through noncatalytic domains, which permits its utility in accordance with the present invention. It is well known in the art that due to the degeneracy of the genetic code numerous different nucleic acid sequences can code for the same amino acid sequence. Equally, it is also well known in the art that conservative changes in amino acid can be made to arrive at a protein or polypeptide that retains the functionality of the original. In both cases, all permutations are intended to be covered by this disclosure.

[0441] Included within the scope of this invention are the functional equivalents of the herein-described isolated nucleic acid molecules. The degeneracy of the genetic code permits substitution of certain codons by other codons that specify the same amino acid and hence would give rise to the same protein. The nucleic acid sequence can vary substantially since, with the exception of methionine and tryptophan, the known amino acids can be coded for by more than one codon. Thus, portions or all of the genes of the invention could be synthesized to give a nucleic acid sequence significantly different from one selected from the group consisting of those set forth in SEQ ID NO:1 through SEQ ID NO:114. The encoded amino acid sequence thereof would, however, be preserved.

[0442] In addition, the nucleic acid sequence may comprise a nucleotide sequence which results from the addition, deletion or substitution of at least one nucleotide to the 5′-end and/or the 3′-end of the nucleic acid formula selected from the group consisting of those set forth in SEQ ID NO:1 through SEQ ID NO:114, or a derivative thereof. Any nucleotide or polynucleotide may be used in this regard, provided that its addition, deletion or substitution does not alter the amino acid sequence of selected from the group consisting of those set forth in SEQ ID NO:1 through 66, which is encoded by the nucleotide sequence. For example, the present invention is intended to include any nucleic acid sequence resulting from the addition of ATG as an initiation codon at the 5′-end of the inventive nucleic acid sequence or its derivative, or from the addition of TTA, TAG or TGA as a termination codon at the 3′-end of the inventive nucleotide sequence or its derivative. Moreover, the nucleic acid molecule of the present invention may, as necessary, have restriction endonuclease recognition sites added to its 5′-end and/or 3′-end.

[0443] Such functional alterations of a given nucleic acid sequence afford an opportunity to promote secretion and/or processing of heterologous proteins encoded by foreign nucleic acid sequences fused thereto. All variations of the nucleotide sequence of the kinase genes of the invention and fragments thereof permitted by the genetic code are, therefore, included in this invention.

[0444] Further, it is possible to delete codons or to substitute one or more codons with codons other than degenerate codons to produce a structurally modified polypeptide, but one which has substantially the same utility or activity as the polypeptide produced by the unmodified nucleic acid molecule. As recognized in the art, the two polypeptides are functionally equivalent, as are the two nucleic acid molecules that give rise to their production, even though the differences between the nucleic acid molecules are not related to the degeneracy of the genetic code.

[0445] A “chemical derivative” of the complex contains additional chemical moieties not normally a part of the protein. Covalent modifications of the protein or peptides are included within the scope of this invention. Such modifications may be introduced into the molecule by reacting targeted amino acid residues of the peptide with an organic derivatizing agent that is capable of reacting with selected side chains or terminal residues, as described below.

[0446] Cysteinyl residues most commonly are reacted with alpha-haloacetates (and corresponding amines), such as chloroacetic acid or chloroacetamide, to give carboxymethyl or carboxyamidomethyl derivatives. Cysteinyl residues also are derivatized by reaction with bromotrifluoroacetone, chloroacetyl phosphate, N-alkylmaleimides, 3-nitro-2-pyridyl disulfide, methyl 2-pyridyl disulfide, p-chloromercuribenzoate, 2-chloromercuri-4-nitrophenyl, or chloro-7-nitrobenzo-2-oxa-1,3-diazole.

[0447] Histidyl residues are derivatized by reaction with diethylprocarbonate at pH 5.5-7.0 because this agent is relatively specific for the histidyl side chain. Para-bromophenacyl bromide also is useful; the reaction is preferably performed in 0.1 M sodium cacodylate at pH 6.0.

[0448] Lysinyl and amino terminal residues are reacted with succinic or other carboxylic acid anhydrides. Derivatization with these agents has the effect or reversing the charge of the lysinyl residues. Other suitable reagents for derivatizing primary amine containing residues include imidoesters such as methyl picolinimidate; pyridoxal phosphate; pyridoxal; chloroborohydride; trinitrobenzenesulfonic acid; O-methylisourea; 2,4 pentanedione; and transaminase-catalyzed reaction with glyoxylate.

[0449] Arginyl residues are modified by reaction with one or several conventional reagents, among them phenylglyoxal, 2,3-butanedione, 1,2-cyclohexanedione, and ninhydrin. Derivatization of arginine residues requires that the reaction be performed in alkaline conditions because of the high pKₐ of the guanidine functional group. Furthermore, these reagents may react with the groups of lysine as well as the arginine alpha-amino group.

[0450] Tyrosyl residues are well-known targets of modification for introduction of spectral labels by reaction with aromatic diazonium compounds or tetranitromethane. Most commonly, N-acetylimidizol and tetranitromethane are used to form O-acetyl tyrosyl species and 3-nitro derivatives, respectively.

[0451] Carboxyl side groups (aspartyl or glutamyl) are selectively modified by reaction with carbodiimide (R′—N—C—N—R′) such as 1-cyclohexyl-3-(2-morpholinyl(4-ethyl) carbodiimide or 1-ethyl-3-(4-azonia-4,4-dimethylpentyl) carbodiimide. Furthermore, aspartyl and glutamyl residues are converted to asparaginyl and glutaminyl residues by reaction with ammonium ions.

[0452] Glutaminyl and asparaginyl residues are frequently deamidated to the corresponding glutamyl and aspartyl residues. Alternatively, these residues are deamidated under mildly acidic conditions. Either form of these residues falls within the scope of this invention.

[0453] Derivatization with bifunctional agents is useful, for example, for cross-linking the component peptides of the protein to each other or to other proteins in a complex to a water-insoluble support matrix or to other macromolecular carriers. Commonly used cross-linking agents include, for example, 1,1-bis(diazoacetyl)-2-phenylethane, glutaraldehyde, N-hydroxysuccinimide esters, for example, esters with 4-azidosalicylic acid, homobifunctional imidoesters, including disuccinimidyl esters such as 3,3′-dithiobis(succinimidylpropionate), and bifunctional maleimides such as bis-N-maleimido-1,8-octane. Derivatizing agents such as methyl-3-[p-azidophenyl) dithio]propioimidate yield photoactivatable intermediates that are capable of forming crosslinks in the presence of light. Alternatively, reactive water-insoluble matrices such as cyanogen bromide-activated carbohydrates and the reactive substrates described in U.S. Pat. Nos. 3,969,287; 3,691,016; 4,195,128; 4,247,642; 4,229,537; and 4,330,440 are employed for protein immobilization.

[0454] Other modifications include hydroxylation of proline and lysine, phosphorylation of hydroxyl groups of seryl or threonyl residues, methylation of the alpha-amino groups of lysine, arginine, and histidine side chains (Creighton, T. E., Proteins: Structure and Molecular Properties, W. H. Freeman & Co., San Francisco, pp. 79-86 (1983)), acetylation of the N-terminal amine, and, in some instances, amidation of the C-terminal carboxyl groups.

[0455] Such derivatized moieties may improve the stability, solubility, absorption, biological half life, and the like. The moieties may alternatively eliminate or attenuate any undesirable side effect of the protein complex and the like. Moieties capable of mediating such effects are disclosed, for example, in Remington's Pharmaceutical Sciences, 18th ed., Mack Publishing Co., Easton, Pa. (1990).

[0456] The term “fragment” is used to indicate a polypeptide derived from the amino acid sequence of the proteins, of the complexes having a length less than the full-length polypeptide from which it has been derived. Such a fragment may, for example, be produced by proteolytic cleavage of the full-length protein. Preferably, the fragment is obtained recombinantly by appropriately modifying the DNA sequence encoding the proteins to delete one or more amino acids at one or more sites of the C-terminus, N-terminus, and/or within the native sequence. Fragments of a protein are useful for screening for substances that act to modulate signal transduction, as described herein. It is understood that such fragments may retain one or more characterizing portions of the native complex. Examples of such retained characteristics include: catalytic activity; substrate specificity; interaction with other molecules in the intact cell; regulatory functions; or binding with an antibody specific for the native complex, or an epitope thereof.

[0457] Another functional derivative intended to be within the scope of the present invention is a “variant” polypeptide which either lacks one or more amino acids or contains additional or substituted amino acids relative to the native polypeptide. The variant may be derived from a naturally occurring complex component by appropriately modifying the protein DNA coding sequence to add, remove, and/or to modify codons for one or more amino acids at one or more sites of the C-terminus, N-terminus, and/or within the native sequence. It is understood that such variants having added, substituted and/or additional amino acids retain one or more characterizing portions of the native protein, as described above.

[0458] A functional derivative of a protein with deleted, inserted and/or substituted amino acid residues may be prepared using standard techniques well-known to those of ordinary skill in the art. For example, the modified components of the functional derivatives may be produced using site-directed mutagenesis techniques (as exemplified by Adelman et al., 1983, DNA 2:183) wherein nucleotides in the DNA coding the sequence are modified such that a modified coding sequence is modified, and thereafter expressing this recombinant DNA in a prokaryotic or eukaryotic host cell, using techniques such as those described above. Alternatively, proteins with amino acid deletions, insertions and/or substitutions may be conveniently prepared by direct chemical synthesis, using methods well-known in the art. The functional derivatives of the proteins typically exhibit the same qualitative biological activity as the native proteins.

### Tables and Description Thereof

[0459] This patent application describes 114 protein and lipid kinase polypeptides identified in genomic and cDNA sequence databases. The results are summarized in the Tables 1-4 described below.

[0460] Table 1 documents the name of each gene, the nucleic acid and amino acid sequence identification numbers, the classifications of each gene (superfamily, family and group), the lengths of the nucleic acid and protein sequences, the positions and lengths of the open reading frames within the sequence. From left to right the data presented is as follows: Gene name, ID#NA, ID#AA, Super-family, Group, Family, Subfamily NA_length, AA_length, ORF Start, ORF End, ORF Length, and Orthologous human gene. “Gene name” refers to name given the sequence encoding the kinase or kinase-like enzyme. The “ID#NA” and “ID#AA” refer to the SEQ ID NOS given each nucleic acid and amino acid sequence in this patent. “Superfamily” identifies whether the gene is a protein kinase, a lipid kinase, or protein-kinase-like. “Group”, “Family”, and “Subfamily” refer to the protein kinase classification defined by sequence homology and based on previously established phylogenetic analysis [Hardie, G. and Hanks S. The Protein Kinase Book, Academic Press (1995) and Hunter T. and Plowman, G. Trends in Biochemical Sciences (1977) 22:18-22 and Manning, G et al (2002) Science 298:1912-1934]. “NA_length” refers to the length in nucleotides of the corresponding nucleic acid sequence. “AA length” refers to the length in amino acids of the peptide encoded in the corresponding nuclei acid sequence. “ORF start” refers to the beginning nucleotide of the open reading frame. “ORF end” refers to the last nucleotide of the open reading frame, excluding the stop codon. “ORF length” refers to the length in nucleotides of the open reading frame (including the stop codon).

TABLE 1

| Gene_{—} | | ID# | ID# | Super- | | | | NA_{—} | AA_{—} | ORF | ORF | ORF | Orthologous |
|---|---|---|---|---|---|---|---|---|---|---|---|---|---|
| Name | mmSK | NA | AA | family | Group | Family | Subfamily | length | length | Start | End | Length | human gene |
| DMPK2 | mSK112 | 1 | 115 | Protein | AGC | DMPK | GEK | 5308 | 1556 | 260 | 4927 | 4668 | DMPK2 |
| | | | | Kinase | | | | | | | | | |
| MRCKb | mSK241 | 2 | 116 | Protein | AGC | DMPK | GEK | 5475 | 1713 | 89 | 5227 | 5139 | MRCKb |
| | | | | Kinase | | | | | | | | | |
| MAST3 | mSK196 | 3 | 117 | Protein | AGC | MAST | | 4149 | 1321 | 56 | 4018 | 3963 | MAST3 |
| | | | | Kinase | | | | | | | | | |
| MAST1 | mSK345 | 4 | 118 | Protein | AGC | MAST | | 4869 | 1570 | 60 | 4769 | 4710 | MAST1 |
| | | | | Kinase | | | | | | | | | |
| LATS1 | mSK441 | 5 | 119 | Protein | AGC | NDR | | 3714 | 1129 | 1 | 3387 | 3387 | LATS1 |
| | | | | Kinase | | | | | | | | | |
| PKN1 | mSK317 | 6 | 120 | Protein | AGC | PKN | | 3092 | 946 | 129 | 2966 | 2838 | PKN1 |
| | | | | Kinase | | | | | | | | | |
| SGK494 | mSK491 | 7 | 121 | Protein | AGC | RSK | | 1306 | 395 | 122 | 1306 | 1185 | SGK494 |
| | | | | Kinase | | | | | | | | | |
| RSKL1 | mSK517 | 8 | 122 | Protein | AGC | RSKL | | 3316 | 1056 | 88 | 3255 | 3168 | RSKL1 |
| | | | | Kinase | | | | | | | | | |
| ADCK4 | mSK013 | 9 | 123 | atyp PK | Atypical | ABC1 | ABC1-A | 2201 | 533 | 156 | 1754 | 1599 | ADCK4 |
| ADCK5 | mSK780 | 10 | 124 | atyp PK | Atypical | ABC1 | ABC1-B | 1953 | 582 | 62 | 1807 | 1746 | ADCK5 |
| AlphaK2 | mSK754 | 11 | 125 | atyp PK | Atypical | Alpha | | 5591 | 1672 | 17 | 5032 | 5016 | AlphaK2 |
| AlphaK3 | mSK755 | 12 | 126 | atyp PK | Atypical | Alpha | | 4398 | 1231 | 448 | 4140 | 3693 | AlphaK3 |
| BCR | mSK047 | 13 | 127 | atyp PK | Atypical | BCR | | 6478 | 1270 | 75 | 3884 | 3810 | BCR |
| ATR | mSK039 | 14 | 128 | atyp PK | Atypical | PIKK | ATR | 8184 | 2635 | 248 | 8152 | 7905 | ATR |
| AMPKa1 | mSK032 | 15 | 129 | Protein | CAMK | CAMKL | A MPK | 1735 | 550 | 25 | 1674 | 1650 | AMPKa1 |
| | | | | Kinase | | | | | | | | | |
| mSK794 | mSK794 | 16 | 130 | Protein | CAMK | CAMKL | M ARK | 1446 | 481 | 1 | 1443 | 1443 | <none> |
| | | | | Kinase | | | | | | | | | |
| mSK798 | mSK798 | 17 | 131 | Protein | CAMK | CAMKL | M ARK | 534 | 177 | 1 | 531 | 531 | <none> |
| | | | | Kinase | | | | | | | | | |
| mSK801 | mSK801 | 18 | 132 | Protein | CAMK | CAMKL | M ARK | 1479 | 492 | 1 | 1476 | 1476 | <none> |
| | | | | Kinase | | | | | | | | | |
| mSK804 | mSK804 | 19 | 133 | Protein | CAMK | CAMKL | M ARK | 1479 | 492 | 1 | 1476 | 1476 | <none> |
| | | | | Kinase | | | | | | | | | |
| mSK805 | mSK805 | 20 | 134 | Protein | CAMK | CAMKL | M ARK | 915 | 304 | 1 | 912 | 912 | <none> |
| | | | | Kinase | | | | | | | | | |
| mSK807 | mSK807 | 21 | 135 | Protein | CAMK | CAMKL | M ARK | 1434 | 477 | 1 | 1431 | 1431 | <none> |
| | | | | Kinase | | | | | | | | | |
| mSK808 | mSK808 | 22 | 136 | Protein | CAMK | CAMKL | M ARK | 717 | 238 | 1 | 714 | 714 | <none> |
| | | | | Kinase | | | | | | | | | |
| mSK809 | mSK809 | 23 | 137 | Protein | CAMK | CAMKL | M ARK | 1425 | 474 | 1 | 1422 | 1422 | <none> |
| | | | | Kinase | | | | | | | | | |
| mSK811 | mSK811 | 24 | 138 | Protein | CAMK | CAMKL | M ARK | 918 | 306 | 1 | 918 | 918 | <none> |
| | | | | Kinase | | | | | | | | | |
| mSK813 | mSK813 | 25 | 139 | Protein | CAMK | CAMKL | M ARK | 1039 | 232 | 387 | 1037 | 651 | <none> |
| | | | | Kinase | | | | | | | | | |
| mSK814 | mSK814 | 26 | 140 | Protein | CAMK | CAMKL | M ARK | 630 | 209 | 1 | 627 | 627 | <none> |
| | | | | Kinase | | | | | | | | | |
| mSK815 | mSK815 | 27 | 141 | Protein | CAMK | CAMKL | M ARK | 1155 | 384 | 1 | 1152 | 1152 | <none> |
| | | | | Kinase | | | | | | | | | |
| mSK817 | mSK817 | 28 | 142 | Protein | CAMK | CAMKL | M ARK | 537 | 178 | 1 | 534 | 534 | <none> |
| | | | | Kinase | | | | | | | | | |
| mSK822 | mSK822 | 29 | 143 | Protein | CAMK | CAMKL | M ARK | 1854 | 617 | 1 | 1851 | 1851 | <none> |
| | | | | Kinase | | | | | | | | | |
| mSK823 | mSK823 | 30 | 144 | Protein | CAMK | CAMKL | M ARK | 1236 | 411 | 1 | 1233 | 1233 | <none> |
| | | | | Kinase | | | | | | | | | |
| mSK826 | mSK826 | 31 | 145 | Protein | CAMK | CAMKL | M ARK | 1563 | 520 | 1 | 1560 | 1560 | <none> |
| | | | | Kinase | | | | | | | | | |
| mSK836 | mSK836 | 32 | 146 | Protein | CAMK | CAMKL | M ARK | 796 | 261 | 11 | 793 | 783 | <none> |
| | | | | Kinase | | | | | | | | | |
| mSK838 | mSK838 | 33 | 147 | Protein | CAMK | CAMKL | M ARK | 1431 | 476 | 1 | 1428 | 1428 | <none> |
| | | | | Kinase | | | | | | | | | |
| mSK840 | mSK840 | 34 | 148 | Protein | CAMK | CAMKL | M ARK | 1545 | 514 | 1 | 1542 | 1542 | <none> |
| | | | | Kinase | | | | | | | | | |
| mSK843 | mSK843 | 35 | 149 | Protein | CAMK | CAMKL | M ARK | 966 | 322 | 1 | 966 | 966 | <none> |
| | | | | Kinase | | | | | | | | | |
| NuaK1 | mSK195 | 36 | 150 | Protein | CAMK | CAMKL | NuaK | 4933 | 658 | 1 | 1974 | 1974 | NuaK1 |
| | | | | Kinase | | | | | | | | | |
| QSK | mSK501 | 37 | 151 | Protein | CAMK | CAMKL | QIK | 4094 | 1356 | 3 | 4070 | 4068 | QSK |
| | | | | Kinase | | | | | | | | | |
| DCAMKL1 | mSK063 | 38 | 152 | Protein | CAMK | DCAMKL | | 2382 | 745 | 145 | 2379 | 2235 | DCAMKL1 |
| | | | | Kinase | | | | | | | | | |
| MNK2 | mSK236 | 39 | 153 | Protein | CAMK | MAPKAPK | MNK | 2682 | 459 | 238 | 1614 | 1377 | MNK2 |
| | | | | Kinase | | | | | | | | | |
| smMLCK | mSK231 | 40 | 154 | Protein | CAMK | MLCK | | 5984 | 1950 | 55 | 5904 | 5850 | smMLCK |
| | | | | Kinase | | | | | | | | | |
| TTN | mSK372 | 41 | 155 | Protein | CAMK | MLCK | | 1 | 0 | 1 | 110838 | 110838 | TTN |
| | | | | Kinase | | | | | | | | | |
| skMLCK | mSK675 | 42 | 156 | Protein | CAMK | MLCK | | 2960 | 613 | 198 | 2036 | 1839 | skMLCK |
| | | | | Kinase | | | | | | | | | |
| SgK085 | mSK709 | 43 | 157 | Protein | CAMK | MLCK | | 1173 | 390 | 1 | 1170 | 1170 | SgK085 |
| | | | | Kinase | | | | | | | | | |
| PIM2 | mSK292 | 44 | 158 | Protein | CAMK | PIM | | 2155 | 411 | 1 | 1233 | 1233 | PIM2 |
| | | | | Kinase | | | | | | | | | |
| Trio | mSK376 | 45 | 159 | Protein | CAMK | Trio | | 10010 | 3103 | 353 | 9661 | 9309 | Trio |
| | | | | Kinase | | | | | | | | | |
| Trad | mSK533 | 46 | 160 | Protein | CAMK | Trio | | 10435 | 2966 | 1 | 8898 | 8898 | Trad |
| | | | | Kinase | | | | | | | | | |
| SPEG | mSK537 | 47 | 161 | Protein | CAMK | Trio | | 10803 | 3262 | 144 | 9929 | 9786 | SPEG |
| | | | | Kinase | | | | | | | | | |
| Obscurin | mSK601 | 48 | 162 | Protein | CAMK | Trio | | 25569 | 8523 | 1 | 25569 | 25569 | Obscurin |
| | | | | Kinase | | | | | | | | | |
| TSSK5 | mSK848 | 49 | 163 | Protein | CAMK | TSSK | | 1519 | 372 | 257 | 1372 | 1116 | <none> |
| | | | | Kinase | | | | | | | | | |
| CK1g3 | mSK087 | 50 | 164 | Protein | CK1 | CK1 | | 2081 | 448 | 252 | 1595 | 1344 | CK1g3 |
| | | | | Kinase | | | | | | | | | |
| TTBK2 | mSK453 | 51 | 165 | Protein | CK1 | TTBK | | 4209 | 1243 | 478 | 4206 | 3729 | TTBK2 |
| | | | | Kinase | | | | | | | | | |
| TTBK1 | mSK526 | 52 | 166 | Protein | CK1 | TTBK | | 4224 | 1308 | 298 | 4221 | 3924 | TTBK1 |
| | | | | Kinase | | | | | | | | | |
| CHED | mSK076 | 53 | 167 | Protein | CMGC | CDK | CRK7 | 5272 | 1511 | 352 | 4884 | 4533 | CHED |
| | | | | Kinase | | | | | | | | | |
| PFTAIRE2 | mSK462 | 54 | 168 | Protein | CMGC | CDK | TAIRE | 1563 | 433 | 68 | 1366 | 1299 | PFTAIRE2 |
| | | | | Kinase | | | | | | | | | |
| CDKL5 | mSK361 | 55 | 169 | Protein | CMGC | CDKL | | 2928 | 904 | 217 | 2928 | 2712 | CDKL5 |
| | | | | Kinase | | | | | | | | | |
| CDKL4 | mSK466 | 56 | 170 | Protein | CMGC | CDKL | | 1029 | 342 | 1 | 1026 | 1026 | CDKL4 |
| | | | | Kinase | | | | | | | | | |
| DYRK4 | mSK116 | 57 | 171 | Protein | CMGC | DYRK | DYRK2 | 1776 | 592 | 1 | 1776 | 1776 | DYRK4 |
| | | | | Kinase | | | | | | | | | |
| HIPK4 | mSK582 | 58 | 172 | Protein | CMGC | DYRK | HIPK | 1929 | 541 | 1 | 1623 | 1623 | HIPK4 |
| | | | | Kinase | | | | | | | | | |
| ERK4 | mSK137 | 59 | 173 | Protein | CMGC | MAPK | ERK | 2206 | 583 | 1 | 1749 | 1749 | ERK4 |
| | | | | Kinase | | | | | | | | | |
| AAK1 | mSK422 | 60 | 174 | Protein | Other | NAK | | 3345 | 958 | 227 | 3100 | 2874 | AAK1 |
| | | | | Kinase | | | | | | | | | |
| NEK1 | mSK250 | 61 | 175 | Protein | Other | NEK | | 5590 | 1275 | 576 | 4400 | 3825 | NEK1 |
| | | | | Kinase | | | | | | | | | |
| NEK5 | mSK558 | 62 | 176 | Protein | Other | NEK | | 2898 | 778 | 92 | 2425 | 2334 | NEK5 |
| | | | | Kinase | | | | | | | | | |
| NEK10 | mSK645 | 63 | 177 | Protein | Other | NEK | | 3336 | 1111 | 1 | 3333 | 3333 | NEK10 |
| | | | | Kinase | | | | | | | | | |
| SgK069 | mSK581 | 64 | 178 | Protein | Other | NKF1 | | 1145 | 362 | 57 | 1142 | 1086 | SgK069 |
| | | | | Kinase | | | | | | | | | |
| SgK110 | mSK592 | 65 | 179 | Protein | Other | NKF1 | | 624 | 207 | 3 | 623 | 621 | SgK110 |
| | | | | Kinase | | | | | | | | | |
| SgK223 | mSK643 | 66 | 180 | Protein | Other | NKF3 | | 4505 | 1373 | 257 | 4375 | 4119 | SgK223 |
| | | | | Kinase | | | | | | | | | |
| SgK269 | mSK649 | 67 | 181 | Protein | Other | NKF3 | | 6996 | 1735 | 470 | 5674 | 5205 | SgK269 |
| | | | | Kinase | | | | | | | | | |
| CLIK1 | mSK493 | 68 | 182 | Protein | Other | NKF4 | | 1870 | 539 | 1 | 1617 | 1617 | CLIK1 |
| | | | | Kinase | | | | | | | | | |
| SgK307 | mSK699 | 69 | 183 | Protein | Other | NKF5 | | 4776 | 1450 | 108 | 4457 | 4350 | SgK307 |
| | | | | Kinase | | | | | | | | | |
| SgK424 | mSK707 | 70 | 184 | Protein | Other | NKF5 | | 1470 | 469 | 64 | 1470 | 1407 | SgK424 |
| | | | | Kinase | | | | | | | | | |
| NRBP2 | mSK520 | 71 | 185 | Protein | Other | NRBP | | 3147 | 499 | 134 | 1630 | 1497 | NRBP2 |
| | | | | Kinase | | | | | | | | | |
| SgK493 | mSK460 | 72 | 186 | Protein | Other | Other-Unique | | 1473 | 491 | 1 | 1473 | 1473 | SgK493 |
| | | | | Kinase | | | | | | | | | |
| SgK496 | mSK516 | 73 | 187 | Protein | Other | Other-Unique | | 5262 | 927 | 52 | 2832 | 2781 | SgK496 |
| | | | | Kinase | | | | | | | | | |
| SgK071 | mSK521 | 74 | 188 | Protein | Other | Other-Unique | | 1878 | 626 | 1 | 1878 | 1878 | SgK071 |
| | | | | Kinase | | | | | | | | | |
| SgK384 | mSK895 | 75 | 189 | Protein | Other | PLK | | 2106 | 599 | 106 | 1902 | 1797 | SgK384 |
| | | | | Kinase | | | | | | | | | |
| Fused | mSK199 | 76 | 190 | Protein | Other | ULK | | 4403 | 1316 | 225 | 4172 | 3948 | Fused |
| | | | | Kinase | | | | | | | | | |
| ULK3 | mSK450 | 77 | 191 | Protein | Other | ULK | | 1807 | 472 | 155 | 1570 | 1416 | ULK3 |
| | | | | Kinase | | | | | | | | | |
| ULK4 | mSK457 | 78 | 192 | Protein | Other | ULK | | 4076 | 1275 | 159 | 3983 | 3825 | ULK4 |
| | | | | Kinase | | | | | | | | | |
| PIK3R4 | mSK262 | 79 | 193 | Protein | Other | VPS15 | | 4777 | 1358 | 455 | 4528 | 4074 | PIK3R4 |
| | | | | Kinase | | | | | | | | | |
| Wee1B | mSK723 | 80 | 194 | Protein | Other | WEE | | 1708 | 555 | 1 | 1665 | 1665 | Wee1B |
| | | | | Kinase | | | | | | | | | |
| Wnk2 | mSK016 | 81 | 195 | Protein | Other | Wnk | | 6432 | 2132 | 34 | 6429 | 6396 | Wnk2 |
| | | | | Kinase | | | | | | | | | |
| Wnk1 | mSK508 | 82 | 196 | Protein | Other | Wnk | | 7658 | 2377 | 110 | 7240 | 7131 | Wnk1 |
| | | | | Kinase | | | | | | | | | |
| Wnk3 | mSK641 | 83 | 197 | Protein | Other | Wnk | | 5256 | 1751 | 1 | 5253 | 5253 | Wnk3 |
| | | | | Kinase | | | | | | | | | |
| HSER | mSK171 | 84 | 198 | Protein | RGC | RGC | | 3924 | 1066 | 120 | 3317 | 3198 | HSER |
| | | | | Kinase | | | | | | | | | |
| CYGX | mSK896 | 85 | 199 | Protein | RGC | RGC | | 3294 | 908 | 571 | 3294 | 2724 | <none> |
| | | | | Kinase | | | | | | | | | |
| KSGC | mSK897 | 86 | 200 | Protein | RGC | RGC | | 3891 | 1101 | 1 | 3303 | 3303 | <none> |
| | | | | Kinase | | | | | | | | | |
| MAP3K6 | mSK503 | 87 | 201 | Protein | STE | STE11 | | 4333 | 1291 | 272 | 4144 | 3873 | MAP3K6 |
| | | | | Kinase | | | | | | | | | |
| MAP3K8 | mSK573 | 88 | 202 | Protein | STE | STE11 | | 4167 | 1388 | 1 | 4164 | 4164 | MAP3K8 |
| | | | | Kinase | | | | | | | | | |
| MAP3K7 | mSK681 | 89 | 203 | Protein | STE | STE11 | | 4003 | 1334 | 1 | 4002 | 4002 | MAP3K7 |
| | | | | Kinase | | | | | | | | | |
| OSR1 | mSK428 | 90 | 204 | Protein | STE | STE20 | FRAY | 2344 | 527 | 285 | 1865 | 1581 | OSR1 |
| | | | | Kinase | | | | | | | | | |
| ZC1 | mSK437 | 91 | 205 | Protein | STE | STE20 | MSN | 4200 | 1328 | 1 | 3984 | 3984 | ZC1 |
| | | | | Kinase | | | | | | | | | |
| ZC2 | mSK438 | 92 | 206 | Protein | STE | STE20 | MSN | 7020 | 1351 | 348 | 4400 | 4053 | ZC2 |
| | | | | Kinase | | | | | | | | | |
| ZC4 | mSK440 | 93 | 207 | Protein | STE | STE20 | MSN | 4620 | 1539 | 1 | 4617 | 4617 | ZC4 |
| | | | | Kinase | | | | | | | | | |
| MYO3B | mSK583 | 94 | 208 | Protein | STE | STE20 | NinaC | 4875 | 1613 | 34 | 4872 | 4839 | MYO3B |
| | | | | Kinase | | | | | | | | | |
| PAK6 | mSK429 | 95 | 209 | Protein | STE | STE20 | PAKB | 4125 | 682 | 633 | 2678 | 2046 | PAK6 |
| | | | | Kinase | | | | | | | | | |
| STLK5 | mSK433 | 96 | 210 | Protein | STE | STE20 | STLK | 2201 | 431 | 203 | 1495 | 1293 | STLK5 |
| | | | | Kinase | | | | | | | | | |
| TAO2 | mSK362 | 97 | 211 | Protein | STE | STE20 | TAO | 4062 | 1240 | 237 | 3956 | 3720 | TAO2 |
| | | | | Kinase | | | | | | | | | |
| TAO3 | mSK435 | 98 | 212 | Protein | STE | STE20 | TAO | 3062 | 898 | 287 | 2980 | 2694 | TAO3 |
| | | | | Kinase | | | | | | | | | |
| TIF1g | mSK785 | 99 | 213 | atyp PK | TIF1 | | | 5149 | 1142 | 74 | 3499 | 3426 | TIF1g |
| ErbB3 | mSK167 | 100 | 214 | Protein | TK | EGFR | | 5978 | 1339 | 122 | 4138 | 4017 | ErbB3 |
| | | | | Kinase | | | | | | | | | |
| EphA5 | mSK125 | 101 | 215 | Protein | TK | Eph | | 4814 | 1041 | 418 | 3540 | 3123 | EphA5 |
| | | | | Kinase | | | | | | | | | |
| EphA6 | mSK646 | 102 | 216 | Protein | TK | Eph | | 4229 | 1130 | 284 | 3673 | 3390 | EphA6 |
| | | | | Kinase | | | | | | | | | |
| LMR2 | mSK414 | 103 | 217 | Protein | TK | Lmr | | 6677 | 1469 | 237 | 4643 | 4407 | LMR2 |
| | | | | Kinase | | | | | | | | | |
| LMR3 | mSK415 | 104 | 218 | Protein | TK | Lmr | | 4930 | 1431 | 501 | 4793 | 4293 | LMR3 |
| | | | | Kinase | | | | | | | | | |
| FGR | mSK148 | 105 | 219 | Protein | TK | Src | | 2184 | 517 | 188 | 1738 | 1551 | FGR |
| | | | | Kinase | | | | | | | | | |
| LRRK2 | mSK690 | 106 | 220 | Protein | TKL | LRRK | | 7985 | 2478 | 58 | 7491 | 7434 | LRRK2 |
| | | | | Kinase | | | | | | | | | |
| LRRK1 | mSK698 | 107 | 221 | Protein | TKL | LRRK | | 7156 | 2004 | 264 | 6275 | 6012 | LRRK1 |
| | | | | Kinase | | | | | | | | | |
| LZK | mSK398 | 108 | 222 | Protein | TKL | MLK | LZK | 3192 | 959 | 313 | 3189 | 2877 | LZK |
| | | | | Kinase | | | | | | | | | |
| MLK2 | mSK233 | 109 | 223 | Protein | TKL | MLK | MLK | 3476 | 940 | 352 | 3171 | 2820 | MLK2 |
| | | | | Kinase | | | | | | | | | |
| BRAF | mSK050 | 110 | 224 | Protein | TKL | RAF | | 2625 | 784 | 165 | 2516 | 2352 | BRAF |
| | | | | Kinase | | | | | | | | | |
| KSR2 | mSK605 | 111 | 225 | Protein | TKL | RAF | | 2895 | 965 | 1 | 2895 | 2895 | KSR2 |
| | | | | Kinase | | | | | | | | | |

| | | | | | | | | | | |
|---|---|---|---|---|---|---|---|---|---|---|
| DGKd | mSK911 | 112 | 226 | Lipid Kinase | 3914 | 1158 | 40 | 3513 | 3474 | DGKd |
| DGKi | mSK914 | 113 | 227 | Lipid Kinase | 3383 | 1041 | 38 | 3160 | 3123 | DGKi |
| DGKq | mSK915 | 114 | 228 | Lipid Kinase | 3136 | 934 | 117 | 2918 | 2802 | DGKq |

[0461] Table 2 describes the results of Smith Waterman similarity searches (Matrix: Pam 100; gap open/extension penalties 12/2) of the amino acid sequences against the NCBI database of non-redundant protein sequences (www.ncbi.nlm.nih.gov/Entrez/protein.html). It is broken into three sections, Tables 2a, 2b and 2c. For Table 2a: from left to right the data presented is as follows: Gene_NAME, ID#na, ID#aa, Super-family, Group, Family, Subfamily, AA length, PSCORE, MATCHES, % Identity; Table 2b: from left to right ID#na, ID#aa, % Similarity, ACCESSION, and DESCRIPTION. The first columns (Gene_NAME, ID#na, ID#aa, Super-family, Group, Family, Subfamily, AA length) are the same as in Table 1. “PSCORE” refers to the Smith Waterman probability score. This number approximates the chance that the alignment occurred by chance. Thus, a very low number, such as 2.10E-64, indicates that there is a very significant match between the query and the database target. “Matches” indicates the number of amino acids that were identical in the alignment. “% Identity” lists the percent of amino acids that were identical over the alignment. “% Similarity” lists the percent of amino acids that were similar over the alignment. ACCESSION refers to the accession number of the most similar protein in the NCBI database of non-redundant proteins. “Description” contains the name and species of origin of the most similar protein in the NCBI database of non-redundant proteins. Table 2c continues the tabulation of the Smith Waterman results. The headings are: Gene_NAME, ID#na, ID#aa, Super-family, Group, Family, Subfamily, QUERYSTART, QUERYEND, TARGETSTART, TARGETEND, % QUERY, % TARGET. The “QUERY” is the patent sequence, and the “TARGET” is the best hit within the NCBI protein database. “QUERYSTART” refers to the amino acid number at which the Query (the patent protein sequence) begins to align with the TARGET (database) sequence. “QUERYEND” refers to the amino acid position within the patent protein sequence (the QUERY) at which the alignment with the database protein (the TARGET) ends. “TARGETSTART” refers to the amino acid position of the database protein (the TARGET) at which the alignment with the patent sequence (the QUERY) begins. “TARGETEND” refers to the amino acid position within the database sequence (the TARGET) at which alignment with the QUERY ends. % QUERY gives the percent of the patent amino acid sequence which is aligned with the database hit (the TARGET). % TARGET gives the percent of the database hit which aligns with the patent sequence.

TABLE 2a

| Gene_{—} | ID# | ID# | Super- | | | | AA | | | |
|---|---|---|---|---|---|---|---|---|---|---|
| Name | na | aa | family | Group | Family | Subfamily | length | PSCORE | MATCHES | % Identity |
| DMPK2 | 1 | 115 | Protein Kinase | AGC | DMPK | GEK | 1556 | 0 | 1424 | 92 |
| MRCKb | 2 | 116 | Protein Kinase | AGC | DMPK | GEK | 1713 | 0 | 1618 | 94 |
| MAST3 | 3 | 117 | Protein Kinase | AGC | MAST | | 1321 | 0 | 1162 | 88 |
| MAST1 | 4 | 118 | Protein Kinase | AGC | MAST | | 1570 | 0 | 1548 | 99 |
| LATS1 | 5 | 119 | Protein Kinase | AGC | NDR | | 1129 | 0 | 1082 | 96 |
| PKN1 | 6 | 120 | Protein Kinase | AGC | PKN | | 946 | 0 | 919 | 97 |
| SGK494 | 7 | 121 | Protein Kinase | AGC | RSK | | 395 | 9.70E−118 | 224 | 57 |
| RSKL1 | 8 | 122 | Protein Kinase | AGC | RSKL | | 1056 | 0 | 878 | 83 |
| ADCK4 | 9 | 123 | atyp PK | Atypical | ABC1 | ABC1-A | 533 | 4.30E−290 | 459 | 86 |
| ADCK5 | 10 | 124 | atyp PK | Atypical | ABC1 | ABC1-B | 582 | 3.00E−303 | 460 | 79 |
| AlphaK2 | 11 | 125 | atyp PK | Atypical | Alpha | | 1672 | 0 | 1469 | 88 |
| AlphaK3 | 12 | 126 | atyp PK | Atypical | Alpha | | 1231 | 0 | 1071 | 87 |
| BCR | 13 | 127 | atyp PK | Atypical | BCR | | 1270 | 0 | 1194 | 94 |
| ATR | 14 | 128 | atyp PK | Atypical | PIKK | ATR | 2635 | 0 | 2389 | 91 |
| AMPKa1 | 15 | 129 | Protein Kinase | CAMK | CAMKL | AMPK | 550 | 4.90E−300 | 545 | 99 |
| mSK794 | 16 | 130 | Protein Kinase | CAMK | CAMKL | MARK | 481 | 3.90E−214 | 393 | 82 |
| mSK798 | 17 | 131 | Protein Kinase | CAMK | CAMKL | MARK | 177 | 1.30E−37 | 89 | 50 |
| mSK801 | 18 | 132 | Protein Kinase | CAMK | CAMKL | MARK | 492 | 4.00E−133 | 302 | 61 |
| mSK804 | 19 | 133 | Protein Kinase | CAMK | CAMKL | MARK | 492 | 9.90E−131 | 301 | 61 |
| mSK805 | 20 | 134 | Protein Kinase | CAMK | CAMKL | MARK | 304 | 4.80E−102 | 224 | 74 |
| mSK807 | 21 | 135 | Protein Kinase | CAMK | CAMKL | MARK | 477 | 1.10E−203 | 384 | 81 |
| mSK808 | 22 | 136 | Protein Kinase | CAMK | CAMKL | MARK | 238 | 2.90E−82 | 166 | 70 |
| mSK809 | 23 | 137 | Protein Kinase | CAMK | CAMKL | MARK | 474 | 7.10E−225 | 397 | 84 |
| mSK811 | 24 | 138 | Protein Kinase | CAMK | CAMKL | MARK | 306 | 1.70E−103 | 198 | 65 |
| mSK813 | 25 | 139 | Protein Kinase | CAMK | CAMKL | MARK | 232 | 4.10E−89 | 155 | 67 |
| mSK814 | 26 | 140 | Protein Kinase | CAMK | CAMKL | MARK | 209 | 2.30E−76 | 147 | 70 |
| mSK815 | 27 | 141 | Protein Kinase | CAMK | CAMKL | MARK | 384 | 2.00E−137 | 276 | 72 |
| mSK817 | 28 | 142 | Protein Kinase | CAMK | CAMKL | MARK | 178 | 1.90E−74 | 140 | 79 |
| mSK822 | 29 | 143 | Protein Kinase | CAMK | CAMKL | MARK | 617 | 5.10E−140 | 451 | 73 |
| mSK823 | 30 | 144 | Protein Kinase | CAMK | CAMKL | MARK | 411 | 5.20E−78 | 180 | 44 |
| mSK826 | 31 | 145 | Protein Kinase | CAMK | CAMKL | MARK | 520 | 1.90E−266 | 480 | 92 |
| mSK836 | 32 | 146 | Protein Kinase | CAMK | CAMKL | MARK | 261 | 2.00E−105 | 214 | 82 |
| mSK838 | 33 | 147 | Protein Kinase | CAMK | CAMKL | MARK | 476 | 2.70E−133 | 287 | 60 |
| mSK840 | 34 | 148 | Protein Kinase | CAMK | CAMKL | MARK | 514 | 1.90E−236 | 457 | 89 |
| mSK843 | 35 | 149 | Protein Kinase | CAMK | CAMKL | MARK | 322 | 8.40E−165 | 301 | 93 |
| NuaK1 | 36 | 150 | Protein Kinase | CAMK | CAMKL | NuaK | 658 | 7.3e−312 | 640 | 97 |
| QSK | 37 | 151 | Protein Kinase | CAMK | CAMKL | QIK | 1356 | 0 | 1194 | 88 |
| DCAMKL1 | 38 | 152 | Protein Kinase | CAMK | DCAMKL | | 745 | 0 | 718 | 96 |
| MNK2 | 39 | 153 | Protein Kinase | CAMK | MAPKA | MNK | 459 | 3.40E−231 | 431 | 94 |
| | | | | | PK | | | | | |
| smMLCK | 40 | 154 | Protein Kinase | CAMK | MLCK | | 1950 | 0 | 1922 | 99 |
| TTN | 41 | 155 | Protein Kinase | CAMK | MLCK | | 36946 | 0 | | 0 |
| skMLCK | 42 | 156 | Protein Kinase | CAMK | MLCK | | 613 | 8.00E−205 | 562 | 92 |
| SgK085 | 43 | 157 | Protein Kinase | CAMK | MLCK | | 390 | 3.00E−158 | 295 | 76 |
| PIM2 | 44 | 158 | Protein Kinase | CAMK | PIM | | 411 | 1.00E−167 | 369 | 90 |
| Trio | 45 | 159 | Protein Kinase | CAMK | Trio | | 3103 | 0 | 2854 | 92 |
| Trad | 46 | 160 | Protein Kinase | CAMK | Trio | | 2966 | 0 | 2901 | 98 |
| SPEC | 47 | 161 | Protein Kinase | CAMK | Trio | | 3262 | 0 | 3231 | 99 |
| Obscurin | 48 | 162 | Protein Kinase | CAMK | Trio | | 8523 | 0 | 5062 | 59 |
| TSSK5 | 49 | 163 | Protein Kinase | CAMK | TSSK | | 372 | 4.80E−180 | 337 | 91 |
| CK1g3 | 50 | 164 | Protein Kinase | CK1 | CK1 | | 448 | 4.70E−267 | 448 | 100 |
| TTBK2 | 51 | 165 | Protein Kinase | CK1 | TTBK | | 1243 | 0 | 1044 | 84 |
| TTBK1 | 52 | 166 | Protein Kinase | CK1 | TTBK | | 1308 | 0 | 1133 | 87 |
| CHED | 53 | 167 | Protein Kinase | CMGC | CDK | CRK7 | 1511 | 0 | 1436 | 95 |
| PFTAIRE2 | 54 | 168 | Protein Kinase | CMGC | CDK | TAIRE | 433 | 3.70E−194 | 352 | 81 |
| CDKL5 | 55 | 169 | Protein Kinase | CMGC | CDKL | | 904 | 0 | 866 | 96 |
| CDKL4 | 56 | 170 | Protein Kinase | CMGC | CDKL | | 342 | 1.80E−137 | 263 | 77 |
| DYRK4 | 57 | 171 | Protein Kinase | CMGC | DYRK | DYRK2 | 592 | 5.6e−320 | 559 | 94 |
| HIPK4 | 58 | 172 | Protein Kinase | CMGC | DYRK | HIPK | 541 | 5.00E−291 | 530 | 98 |
| ERK4 | 59 | 173 | Protein Kinase | CMGC | MAPK | ERK | 583 | 4.20E−224 | 479 | 82 |
| AAK1 | 60 | 174 | Protein Kinase | Other | NAK | | 958 | 1.50E−230 | 757 | 79 |
| NEK1 | 61 | 175 | Protein Kinase | Other | NEK | | 1275 | 0 | 1030 | 81 |
| NEK5 | 62 | 176 | Protein Kinase | Other | NEK | | 778 | 4.00E−274 | 590 | 76 |
| NEK10 | 63 | 177 | Protein Kinase | Other | NEK | | 1111 | 0 | 857 | 77 |
| SgK069 | 64 | 178 | Protein Kinase | Other | NKF1 | | 362 | 3.40E−178 | 304 | 84 |
| SgK110 | 65 | 179 | Protein Kinase | Other | NKF1 | | 207 | 1.30E−88 | 162 | 78 |
| SgK223 | 66 | 180 | Protein Kinase | Other | NKF3 | | 1373 | 0 | 1178 | 86 |
| SgK269 | 67 | 181 | Protein Kinase | Other | NKF3 | | 1735 | 0 | 1042 | 60 |
| CLIK1 | 68 | 182 | Protein Kinase | Other | NKF4 | | 539 | 1.00E−202 | 457 | 85 |
| SgK307 | 69 | 183 | Protein Kinase | Other | NKF5 | | 1450 | 0 | 1232 | 85 |
| SgK424 | 70 | 184 | Protein Kinase | Other | NKF5 | | 469 | 6.40E−163 | 312 | 67 |
| NRBP2 | 71 | 185 | Protein Kinase | Other | NRBP | | 499 | 9.20E−289 | 497 | 100 |
| SgK493 | 72 | 186 | Protein Kinase | Other | Other-Unique | | 491 | 3.80E−213 | 354 | 72 |
| SgK496 | 73 | 187 | Protein Kinase | Other | Other-Unique | | 927 | 0 | 817 | 88 |
| SgK071 | 74 | 188 | Protein Kinase | Other | Other-Unique | | 626 | 1.90E−209 | 435 | 69 |
| SgK384 | 75 | 189 | Protein Kinase | Other | PLK | | 599 | 9.90E−201 | 380 | 63 |
| Fused | 76 | 190 | Protein Kinase | Other | ULK | | 1316 | 0 | 1113 | 85 |
| ULK3 | 77 | 191 | Protein Kinase | Other | ULK | | 472 | 1.80E−226 | 444 | 94 |
| ULK4 | 78 | 192 | Protein Kinase | Other | ULK | | 1275 | 0 | 878 | 69 |
| PIK3R4 | 79 | 193 | Protein Kinase | Other | VPS15 | | 1358 | 0 | 1302 | 96 |
| Wee1B | 80 | 194 | Protein Kinase | Other | WEE | | 555 | 1.40E−194 | 330 | 59 |
| Wnk2 | 81 | 195 | Protein Kinase | Other | Wnk | | 2132 | 0 | 1897 | 89 |
| Wnk1 | 82 | 196 | Protein Kinase | Other | Wnk | | 2377 | 0 | 2045 | 86 |
| Wnk3 | 83 | 197 | Protein Kinase | Other | Wnk | | 1751 | 0 | 1401 | 80 |
| HSER | 84 | 198 | Protein Kinase | RGC | RGC | | 1066 | 0 | 1001 | 94 |
| CYGX | 85 | 199 | Protein Kinase | RGC | RGC | | 908 | 0 | 852 | 94 |
| KSGC | 86 | 200 | Protein Kinase | RGC | RGC | | 1101 | 0 | 970 | 88 |
| MAP3K6 | 87 | 201 | Protein Kinase | STE | STE11 | | 1291 | 0 | 1248 | 97 |
| MAP3K8 | 88 | 202 | Protein Kinase | STE | STE11 | | 1388 | 0 | 1327 | 96 |
| MAP3K7 | 89 | 203 | Protein Kinase | STE | STE11 | | 1334 | 0 | 1157 | 87 |
| OSR1 | 90 | 204 | Protein Kinase | STE | STE20 | FRAY | 527 | 1.80E−241 | 505 | 96 |
| ZC1 | 91 | 205 | Protein Kinase | STE | STE20 | MSN | 1328 | 1.20E−300 | 1233 | 93 |
| ZC2 | 92 | 206 | Protein Kinase | STE | STE20 | MSN | 1351 | 0 | 1335 | 99 |
| ZC4 | 93 | 207 | Protein Kinase | STE | STE20 | MSN | 1539 | 0 | 1454 | 94 |
| MYO3B | 94 | 208 | Protein Kinase | STE | STE20 | NinaC | 1613 | 0 | 1007 | 62 |
| PAK6 | 95 | 209 | Protein Kinase | STE | STE20 | PAKB | 682 | 8.66e−320 | 668 | 98 |
| STLK5 | 96 | 210 | Protein Kinase | STE | STE20 | STLK | 431 | 5.30E−244 | 408 | 95 |
| TAO2 | 97 | 211 | Protein Kinase | STE | STE20 | TAO | 1240 | 0 | 1211 | 98 |
| TAO3 | 98 | 212 | Protein Kinase | STE | STE20 | TAO | 898 | 0 | 859 | 96 |
| TIF1g | 99 | 213 | atyp PK | TIF1 | | | 1142 | 4.40E−267 | 1084 | 95 |
| ErbB3 | 100 | 214 | Protein Kinase | TK | EGFR | | 1339 | 0 | 1294 | 97 |
| EphA5 | 101 | 215 | Protein Kinase | TK | Eph | | 1041 | 0 | 997 | 96 |
| EphA6 | 102 | 216 | Protein Kinase | TK | Eph | | 1130 | 0 | 1035 | 92 |
| LMR2 | 103 | 217 | Protein Kinase | TK | Lmr | | 1469 | 0 | 1144 | 78 |
| LMR3 | 104 | 218 | Protein Kinase | TK | Lmr | | 1431 | 0 | 1145 | 80 |
| FGR | 105 | 219 | Protein Kinase | TK | Src | | 517 | 2.70E−276 | 517 | 100 |
| LRRK2 | 106 | 220 | Protein Kinase | TKL | LRRK | | 2478 | 0 | 1269 | 51 |
| LRRK1 | 107 | 221 | Protein Kinase | TKL | LRRK | | 2004 | 0 | 1901 | 95 |
| LZK | 108 | 222 | Protein Kinase | TKL | MLK | LZK | 959 | 0 | 860 | 90 |
| MLK2 | 109 | 223 | Protein Kinase | TKL | MLK | MLK | 940 | 0 | 919 | 98 |
| BRAF | 110 | 224 | Protein Kinase | TKL | RAF | | 784 | 1.50E−235 | 742 | 95 |
| KSR2 | 111 | 225 | Protein Kinase | TKL | RAF | | 965 | 7.00E−145 | 400 | 41 |

| | | | | | | | |
|---|---|---|---|---|---|---|---|
| DGKd | 112 | 226 | Lipid Kinase | 1158 | 0 | 1086 | 94 |
| DGKi | 113 | 227 | Lipid Kinase | 1041 | 0 | 1010 | 97 |
| DGKq | 114 | 228 | Lipid Kinase | 934 | 0 | 900 | 96 |

[0462] TABLE 2b

| ID# | ID# | % | | |
|---|---|---|---|---|
| na | aa | Similarity | ACCESSION | DESCRIPTION |
| 1 | 115 | 94 | gi\|27661270\|ref\| | similar to Ser-Thr protein kinase related to the myotonic dystrophy protein |
| | | | XP_219530.1\| | kinase [Rattus norvegicus] |
| 2 | 116 | 97 | gi\|16758420\|ref\| | Cdc42-binding protein kinase beta [Rattus norvegicus] |
| | | | NP_446072.1\| | |
| 3 | 117 | 92 | gi\|3043646\|dbj\| | KIAA0561 protein [Homo sapiens] |
| | | | BAA25487.1\| | |
| 4 | 118 | 99 | gi\|29373057\|gb\| | syntrophin-associated serine/threonine kinase SAST170 [Rattus norvegicus] |
| | | | AAO72536.1\| | |
| 5 | 119 | 98 | gi\|27730757\|ref\| | similar to LATS homolog 1 [Homo sapiens] [Rattus norvegicus] |
| | | | XP_218062.1\| | |
| 6 | 120 | 99 | gi\|16905491\|gb\| | cardiolipin/protease-activated protein kinase-1 [Rattus norvegicus] |
| | | | AAL31374.1\|L35634_1 | |
| 7 | 121 | 61 | gi\|21389411\|ref\| | hypothetical protein FLJ25006 [Homo sapiens] |
| | | | NP_653211.1\| | |
| 8 | 122 | 83 | gi\|28483931\|ref\| | RIKEN cDNA B130003F20 gene [Mus musculus] |
| | | | XP_129675.2\| | |
| 9 | 123 | 91 | gi\|27363457\|ref\| | hypothetical protein FLJ12229 [Homo sapiens] |
| | | | NP_079152.3\| | |
| 10 | 124 | 79 | gi\|27370472\|ref\| | hypothetical protein A230108P17 [Mus musculus] |
| | | | NP_766548.1\| | |
| 11 | 125 | 88 | gi\|15430296\|gb\| | heart alpha-kinase [Mus musculus] |
| | | | AAK95953.1\| | |
| 12 | 126 | 87 | gi\|20875939\|ref\| | similar to lymphocyte alpha-kinase [Homo sapiens] [Mus musculus] |
| | | | XP_143521.1\| | |
| 13 | 127 | 97 | gi\|11038639\|ref\| | breakpoint cluster region isoform 1 [Homo sapiens] |
| | | | NP_004318.2\| | |
| 14 | 128 | 96 | gi\|1235902\|gb\| | FRAP-related protein |
| | | | AAC50405.1\| | |
| 15 | 129 | 99 | gi\|11862980\|ref\| | protein kinase, AMP-activated, alpha 1 catalytic subunit; 5′-AMP-activated |
| | | | NP_062015.1\| | protein kinase alpha-1 catalytic subunit [Rattus norvegicus] |
| 16 | 130 | 85 | gi\|20900474\|ref\| | similar to MAP/microtubule affinity-regulating kinase 2 isoform a; ELKL motif |
| | | | XP_140045.1\| | kinase 1; ELKL motif kinase [Homo sapiens] [Mus musculus] |
| 17 | 131 | 64 | gi\|26325454\|dbj\| | unnamed protein product [Mus musculus] |
| | | | BAC26481.1\| | |
| 18 | 132 | 76 | gi\|27369690\|ref\| | hypothetical protein 4930509O22 [Mus musculus] |
| | | | NP_766092.1\| | |
| 19 | 133 | 76 | gi\|27369690\|ref\| | hypothetical protein 4930509O22 [Mus musculus] |
| | | | NP_766092.1\| | |
| 20 | 134 | 74 | gi\|25050195\|ref\| | similar to MAP/microtubule affinity-regulating kinase like 1; MARK4 |
| | | | XP_195585.1\| | serine/threonine protein kinase [Homo sapiens] [Mus musculus] |
| 21 | 135 | 84 | gi\|20900474\|ref\| | similar to MAP/microtubule affinity-regulating kinase 2 isoform a; ELKL motif |
| | | | XP_140045.1\| | kinase 1; ELKL motif kinase [Homo sapiens] [Mus musculus] |
| 22 | 136 | 83 | gi\|27703602\|ref\| | similar to serine/threonine kinase [Rattus norvegicus] |
| | | | XP_230703.1\| | |
| 23 | 137 | 84 | gi\|29243962\|ref\| | hypothetical protein 4932415M13 [Mus musculus] |
| | | | NP_808267.1\| | |
| 24 | 138 | 78 | gi\|27679020\|ref\| | similar to serine/threonine kinase [Rattus norvegicus] |
| | | | XP_222975.1] | |
| 25 | 139 | 72 | gi\|26325454\|dbj\| | unnamed protein product [Mus musculus] |
| | | | BAC26481.1\| | |
| 26 | 140 | 84 | gi\|27687803\|ref\| | similar to Ser/Thr protein kinase PAR-1alpha [Drosophila melanogaster] |
| | | | XP_237567.1\| | [Rattus norvegicus] |
| 27 | 141 | 72 | gi\|20822134\|ref\| | similar to Ser/Thr protein kinase PAR-1alpha [Drosophila melanogaster] |
| | | | XP_145432.1\| | [Mus musculus] |
| 28 | 142 | 79 | gi\|20822164\|ref\| | similar to KP78a gene product [Drosophila melanogaster] [Mus musculus] |
| | | | XP_145444.1\| | |
| 29 | 143 | 82 | gi\|26325454\|dbj\| | unnamed protein product [Mus musculus] |
| | | | BAC26481.1\| | |
| 30 | 144 | 60 | gi\|27731641\|ref\| | similar to MAP/microtubule affinity-regulating kinase like 1; MARK4 |
| | | | XP_218667.1\| | serine/threonine protein kinase [Homo sapiens] [Rattus norvegicus] |
| 31 | 145 | 92 | gi\|20900474\|ref\| | similar to MAP/microtubule affinity-regulating kinase 2 isoform a; ELKL motif |
| | | | XP 140045.1\| | kinase 1; ELKL motif kinase [Homo sapiens] [Mus musculus] |
| 32 | 146 | 84 | gi\|28503636\|ref\| | similar to serine/threonine kinase [Rattus norvegicus] [Mus musculus] |
| | | | XP_195367.2\| | |
| 33 | 147 | 72 | gi\|27369690\|ref\| | hypothetical protein 4930509O22 [Mus musculus] |
| | | | NP_766092.1\| | |
| 34 | 148 | 92 | gi\|20956294\|ref\| | similar to putative protein kinase [Mus musculus] |
| | | | XP_142616.1\| | |
| 35 | 149 | 97 | gi\|20900474\|ref\| | similar to MAP/microtubule affinity-regulating kinase 2 isoform a; ELKL motif |
| | | | XP_140045.1\| | kinase 1; ELKL motif kinase [Homo sapiens] [Mus musculus] |
| 36 | 150 | 98 | gi\|27717823\|ref\| | similar to Probable serine/threonine-protein kinase KIAA0537 [Rattus norvegicus] |
| | | | XP_234998.1\| | |
| 37 | 151 | 93 | gi\|14133229\|dbj\| | KIAA0999 protein [Homo sapiens] |
| | | | BAA76843.2\| | |
| 38 | 152 | 97 | gi\|4758128\|ref\| | doublecortin and CaM kinase-like 1; doublecortin-like kinase [Homo sapiens] |
| | | | NP_004725.1\| | |
| 39 | 153 | 97 | gi\|4464284\|gb\| | Putative map kinase interacting kinase [Homo sapiens] |
| | | | AAD21217.1\| | |
| 40 | 154 | 99 | gi\|29650205\|gb\| | 220 kDa myosin light chain kinase [Mus musculus] |
| | | | AAO85807.1\| | |
| 41 | 155 | 0 | gi\|17066105\|emb\| | Titin [Homo sapiens] |
| | | | CAD12456.1\| | |
| 42 | 156 | 95 | gi\|125494\|sp\| | Myosin light chain kinase 2, skeletal/cardiac muscle (MLCK2) |
| | | | P20689\|KML2_RAT | |
| 43 | 157 | 76 | gi\|20345411\|ref\| | similar to myosin light chain kinase (MLCK) [Homo sapiens] [Mus musculus] |
| | | | XP_111421.1\| | |
| 44 | 158 | 90 | gi\|20070430\|ref\| | serine-threonine protein kinase pim-2 isoform 1; DNA segment, Chr X, |
| | | | NP_613072.1\| | Celltech Chiroscience 3 [Mus musculus] |
| 45 | 159 | 94 | gi\|8928460\|sp\| | Triple functional domain protein (PTPRF interacting protein) |
| | | | O75962\|TRIO_HUMAN | |
| 46 | 160 | 99 | gi\|14091744\|ref\| | huntingtin-associated protein interacting protein (duo) [Rattus norvegicus] |
| | | | NP_114451.1\| | |
| 47 | 161 | 99 | gi\|11385416\|gb\| | striated muscle-specific serine/threonine protein kinase [Mus musculus] |
| | | | AAG34791.1\|AF215896_1 | |
| 48 | 162 | 66 | gi\|15026974\|emb\| | obscurin [Homo sapiens] |
| | | | \|CAC44768.1\| | |
| 49 | 163 | 95 | gi\|27662252\|ref\| | similar to serine/threonine kinase 22B (spermiogenesis associated); testis specific |
| | | | XP_235450.1\| | serine threonine kinase 2; spermiogenesis associated 2 [Homo sapiens] [Rattus norvegicus] |
| 50 | 164 | 100 | gi\|12408306\|ref\| | casein kinase 1 gamma 3 isoform [Rattus norvegicus] |
| | | | NP_074046.1\| | |
| 51 | 165 | 89 | gi\|28466991\|ref\| | tau-tubulin kinase [Homo sapiens] |
| | | | NP_775771.2\| | |
| 52 | 166 | 91 | gi\|20555151\|ref\| | similar to tau tubulin kinase 1; tau-tubulin kinase [Mus musculus] |
| | | | XP_166453.1\| | [Homo sapiens] |
| 53 | 167 | 98 | gi\|14110387\|ref\| | cell division cycle 2-like 5 isoform 1; CDC2-related protein kinase |
| | | | NP_003709.2\| | 5 [Homo sapiens] |
| 54 | 168 | 85 | gi\|21040235\|ref\| | amyotrophic lateral sclerosis 2 (juvenile) chromosome region, candidate 7 |
| | | | NP_631897.1\| | [Homo sapiens] |
| 55 | 169 | 99 | gi\|4507281\|ref\| | cyclin-dependent kinase-like 5; serine/threonine kinase 9 [Homo sapiens] |
| | | | NP_003150.1\| | |
| 56 | 170 | 84 | gi\|29731492\|ref\| | similar to cyclin-dependent kinase-like 1 (CDC2-related kinase) [Mus musculus] |
| | | | XP_293029.1\| | [Homo sapiens] |
| 57 | 171 | 94 | gi\|28526538\|ref\| | expressed sequence AW049118 [Mus musculus] |
| | | | XP_132896.3\| | |
| 58 | 172 | 99 | gi\|27676688\|ref\| | similar to hypothetical protein [Macaca fascicularis] [Rattus norvegicus] |
| | | | XP_218355.1\| | |
| 59 | 173 | 85 | gi\|4506089\|ref\| | mitogen-activated protein kinase 4; Erk3-related; protein kinase, mitogen- |
| | | | NP_002738.1\| | activated 4 (MAP kinase 4; p63) [Homo sapiens] |
| 60 | 174 | 83 | gi\|5689433\|dbj\| | KIAA1048 protein [Homo sapiens] |
| | | | BAA83000.1\| | |
| 61 | 175 | 88 | gi\|15620861\|dbj\| | KIAA1901 protein [Homo sapiens] |
| | | | BAB67794.1\| | |
| 62 | 176 | 76 | gi\|28483717\|ref\| | similar to Serine/threonine-protein kinase NEK1 (NimA-related protein |
| | | | XP_284399.1\| | kinase 1) (NY-REN-55 antigen) [Mus musculus] |
| 63 | 177 | 80 | gi\|27674063\|ref\| | similar to hypothetical protein FLJ32685 [Homo sapiens] [Rattus norvegicus] |
| | | | XP_223815.1\| | |
| 64 | 178 | 86 | gi\|27675620\|ref\| | similar to protein kinase Bsk146 [Danio rerio] [Rattus norvegicus] |
| | | | XP_218202.1\| | |
| 65 | 179 | 86 | gi\|27485033\|ref\| | similar to protein kinase Bsk146 [Danio rerio] [Homo sapiens] |
| | | | XP_210370.1\| | |
| 66 | 180 | 86 | gi\|27370398\|ref\| | DNA segment, Chr 8, ERATO Doi 82, expressed [Mus musculus] |
| | | | NP_766499.1\| | |
| 67 | 181 | 62 | gi\|27720351\|ref\| | hypothetical protein XP_236266 [Rattus norvegicus] |
| | | | XP_236266.1\| | |
| 68 | 182 | 89 | gi\|12830335\|emb\| | bA550O8.2 (novel protein kinase) [Homo sapiens |
| | | | CAC10518.2\| | ] |
| 69 | 183 | 85 | gi\|13878215\|ref\| | testis expressed gene 14 [Mus musculus] |
| | | | NP_113563.1\| | |
| 70 | 184 | 68 | gi\|28477970\|ref\| | similar to testis protein TEX14 [Mus musculus] |
| | | | XP_145510.2\| | |
| 71 | 185 | 100 | gi\|27662242\|ref\| | similar to nuclear receptor binding protein; multiple domain putative nuclear |
| | | | XP_235443.1\| | protein [Homo sapiens] [Rattus norvegicus] |
| 72 | 186 | 74 | gi\|27716501\|ref\| | hypothetical protein XP_233838 [Rattus norvegicus] |
| | | | XP_233838.1\| | |
| 73 | 187 | 90 | gi\|27712032\|ref\| | similar to Retinoblastoma-binding protein 5 (RBBP-5) (Retinoblastoma- |
| | | | XP_222647.1\| | binding protein RBQ-3) [Rattus norvegicus] |
| 74 | 188 | 76 | gi\|27706574\|ref\| | similar to Protein kinase [Caenorhabditis elegans] [Rattus norvegicus] |
| | | | XP_231122.1\| | |
| 75 | 189 | 64 | gi\|28497763\|ref\| | similar to Cytokine-inducible serine/threonine-protein kinase (FGF-inducible |
| | | | XP_125726.3\| | kinase) [Mus musculus] |
| 76 | 190 | 92 | gi\|24308123\|ref\| | serine/threonine kinase 36 (fused homolog, Drosophila); serine/threonine |
| | | | NP_056505.1\| | kinase 36, fused homolog (Drosophila) [Homo sapiens] |
| 77 | 191 | 98 | gi\|27483725\|ref\| | DKFZP434C131 protein [Homo sapiens] |
| | | | XP_044630.2\| | |
| 78 | 192 | 69 | gi\|12855303\|dbj\| | unnamed protein product [Mus musculus] |
| | | | BAB30285.1\| | |
| 79 | 193 | 98 | gi\|23943912\|ref\| | phosphoinositide-3-kinase, regulatory subunit 4, p150; phosphatidylinositol |
| | | | NP_055417.1\| | 3-kinase-associated p150 [Homo sapiens] |
| 80 | 194 | 63 | gi\|27709826\|ref\| | similar to Wee1-like protein kinase (WEE1hu) [Rattus norvegicus] |
| | | | XP_231708.1\| | |
| 81 | 195 | 92 | gi\|27683635\|ref\| | similar to KIAA1760 protein [Homo sapiens] [Rattus norvegicus] |
| | | | XP_225204.1\| | |
| 82 | 196 | 92 | gi\|12711660\|ref\| | protein kinase, lysine deficient 1; kinase deficient protein [Homo sapiens] |
| | | | NP_061852.1\| | |
| 83 | 197 | 89 | gi\|19032238\|emb\| | protein kinase WNK3 [Homo sapiens] |
| | | | CAC32455.2\| | |
| 84 | 198 | 97 | gi\|6981000\|ref\| | guanylate cyclase 2C (heat stable enterotoxin receptor) [Rattus norvegicus] |
| | | | NP_037302.1\| | |
| 85 | 199 | 97 | gi\|18543337\|ref\| | guanylate cyclase 2d [Rattus norvegicus] |
| | | | NP_570093.1\| | |
| 86 | 200 | 93 | gi\|20514776\|ref\| | guanylyl cyclase with kinase-like domain, soluble [Rattus norvegicus] |
| | | | NP_620611.1\| | |
| 87 | 201 | 97 | gi\|7709976\|ref\| | mitogen-activated protein kinase kinase kinase 6; apoptosis signal- |
| | | | NP_057902.1\| | regulating kinase 2 [Mus musculus] |
| 88 | 202 | 96 | gi\|28482297\|ref\| | similar to hypothetical protein FLJ23074 |
| | | | XP_136210.3\| | [Homo sapiens] [Mus musculus] |
| 89 | 203 | 87 | gi\|25056550\|ref\| | similar to MAP/ERK kinase kinase 5; apoptosis signal regulating kinase |
| | | | XP_194648.1\| | [Homo sapiens] [Mus musculus] |
| 90 | 204 | 98 | gi\|4826878\|ref\| | oxidative-stress responsive 1 [Homo sapiens] |
| | | | NP_005100.1\| | |
| 91 | 205 | 93 | gi\|6679060\|ref\| | mitogen-activated protein kinase kinase kinase kinase 4; NCK interacting |
| | | | NP_032722.1\| | kinase; HPK/GCK-like kinase [Mus musculus] |
| 92 | 206 | 100 | gi\|6110355\|gb\| | Traf2 and NCK interacting kinase, splice variant 4 [Homo sapiens] |
| | | | AAF03785.1\|AF172267_1 | |
| 93 | 207 | 95 | gi\|6472874\|dbj\| | Nek-interacting kinase-like embryo specific kinase [Mus musculus] |
| | | | BAA87066.1\| | |
| 94 | 208 | 66 | gi\|27448205\|gb\| | myosin IIIB variant MYO3B.2 [Homo sapiens] |
| | | | AAO13800.1\| | |
| 95 | 209 | 99 | gi\|27731989\|ref\| | similar to Serine/threonine-protein kinase PAK 6 (p21-activated kinase 6) |
| | | | XP_230519.1\| | (PAK-6) (PAK-5) [Rattus norvegicus] |
| 96 | 210 | 98 | gi\|12060855\|gb\| | serologically defined breast cancer antigen NY-BR-96 [Homo sapiens] |
| | | | AAG48269.1\|AF308302_1 | |
| 97 | 211 | 98 | gi\|12083665\|ref\| | serine/threonine protein kinase TA02 [Rattus norvegicus] |
| | | | NP_073193.1\| | |
| 98 | 212 | 98 | gi\|19923464\|ref\| | STE20-like kinase; STE2-like kinase [Homo sapiens] |
| | | | NP_057365.2\| | |
| 99 | 213 | 97 | gi\|5689563\|dbj\| | KIAA1113 protein [Homo sapiens] |
| | | | BAA83065.1\| | |
| 100 | 214 | 99 | gi\|17432904\|ref\| | avian erythroblastosis oncogene B 3; v-erb-b2 erythroblastic leukemia viral |
| | | | NP_058914.2\| | oncogene homolog 3 (avian) [Rattus norvegicus] |
| 101 | 215 | 98 | gi\|24307885\|ref\| | EphA5; Hek7; ephrin receptor EphA5; TYRO4 protein tyrosine |
| | | | NP_004430.1\| | kinase [Homo sapiens] |
| 102 | 216 | 92 | gi\|20893175\|ref\| | Eph receptor A6 [Mus musculus] |
| | | | XP_147261.1\| | |
| 103 | 217 | 87 | gi\|27356940\|gb\| | KPI-2 protein [Homo sapiens] |
| | | | AAN08717.1\| | |
| 104 | 218 | 84 | gi\|20546870\|ref\| | similar to KIAA1883 protein [Homo sapiens] |
| | | | XP_055866.4\| | |
| 105 | 219 | 100 | gi\|26331398\|dbj\| | unnamed protein product [Mus musculus] |
| | | | BAC29429.1\| | |
| 106 | 220 | 54 | gi\|29745105\|ref\| | similar to RIKEN cDNA 4921513O20 [Mus musculus] [Homo sapiens] |
| | | | XP_058513.5\| | |
| 107 | 221 | 97 | gi\|27676850\|ref\| | similar to KIAA1790 protein [Homo sapiens] [Rattus norvegicus] |
| | | | XP_218760.1\| | |
| 108 | 222 | 95 | gi\|4758696\|ref\| | mitogen-activated protein kinase kinase kinase 13; leucine zipper-bearing |
| | | | NP_004712.1\| | kinase [Homo sapiens] |
| 109 | 223 | 99 | gi\|27676716\|ref\| | similar to mitogen-activated protein kinase kinase kinase 10; mixed lineage |
| | | | XP_218368.1\| | kinase 2; MKN28 kinase; MKN28 derived nonreceptor_type serine/threonine |
| | | | | kinase [Homo sapiens] [Rattus norvegicus] |
| 110 | 224 | 96 | gi\|4757868\|ref\| | v-raf murine sarcoma viral oncogene homolog B1; Murine sarcoma viral (v-raf) |
| | | | NP_004324.1\| | oncogene homolog B1 [Homo sapiens] |
| 111 | 225 | 42 | gi\|27499671\|ref\| | similar to protein kinase related to Raf protein kinases; Method: conceptual |
| | | | XP_208683.1\| | translation supplied by author [Homo sapiens] |
| 112 | 226 | 97 | gi\|12644420\|sp\| | Diacylglycerol kinase, delta (Diglyceride kinase) (DGK-delta) (DAG kinase |
| | | | Q16760\|KDGD_HUMAN | delta) (130 kDa diacylglycerol kinase) |
| 113 | 227 | 98 | gi\|29466777\|dbj\| | diacylglycerol kinase iota-1 [Rattus norvegicus] |
| | | | BAC66854.1\| | |
| 114 | 228 | 98 | gi\|27677206\|ref\| | similar to Diacylglycerol kinase, theta (Diglyceride kinase) (DGK-theta) (DAG |
| | | | XP_223739.1\| | kinase theta) [Rattus norvegicus] |

[0463] TABLE 2c

| Gene_{—} | ID# | ID# | Super- | | | | QUERY | QUERY | TARGET | TARGET | % | % |
|---|---|---|---|---|---|---|---|---|---|---|---|---|
| Name | na | aa | family | Group | Family | Subfamily | START | END | START | END | QUERY | TARGET |
| DMPK2 | 1 | 115 | Protein | AGC | DMPK | GEK | 1 | 1509 | 1 | 1544 | 92 | 85 |
| | | | Kinase | | | | | | | | | |
| MRCKb | 2 | 116 | Protein | AGC | DMPK | GEK | 1 | 1693 | 1 | 1693 | 94 | 95 |
| | | | Kinase | | | | | | | | | |
| MAST3 | 3 | 117 | Protein | AGC | MAST | | 39 | 1321 | 16 | 1308 | 88 | 89 |
| | | | Kinase | | | | | | | | | |
| MAST1 | 4 | 118 | Protein | AGC | MAST | | 1 | 1570 | 1 | 1570 | 99 | 99 |
| | | | Kinase | | | | | | | | | |
| LATS1 | 5 | 119 | Protein | AGC | NDR | | 1 | 1127 | 1 | 1128 | 96 | 88 |
| | | | Kinase | | | | | | | | | |
| PKN1 | 6 | 120 | Protein | AGC | PKN | | 1 | 946 | 1 | 946 | 97 | 97 |
| | | | Kinase | | | | | | | | | |
| SGK494 | 7 | 121 | Protein | AGC | RSK | | 1 | 264 | 1 | 271 | 57 | 82 |
| | | | Kinase | | | | | | | | | |
| RSKL1 | 8 | 122 | Protein | AGC | RSKL | | 1 | 960 | 1 | 878 | 83 | 100 |
| | | | Kinase | | | | | | | | | |
| ADCK4 | 9 | 123 | atyp PK | Atypical | ABC1 | ABC1-A | 1 | 525 | 1 | 524 | 86 | 84 |
| ADCK5 | 10 | 124 | atyp PK | Atypical | ABC1 | ABC1-B | 123 | 582 | 1 | 460 | 79 | 100 |
| AlphaK2 | 11 | 125 | atyp PK | Atypical | Alpha | | 200 | 1672 | 3 | 1475 | 88 | 100 |
| AlphaK3 | 12 | 126 | atyp PK | Atypical | Alpha | | 158 | 1228 | 16 | 1134 | 87 | 94 |
| BCR | 13 | 127 | atyp PK | Atypical | BCR | | 1 | 1270 | 1 | 1271 | 94 | 94 |
| ATR | 14 | 128 | atyp PK | Atypical | PIKK | ATR | 1 | 2635 | 1 | 2644 | 91 | 90 |
| AMPKa1 | 15 | 129 | Protein | CAMK | CAMKL | A MPK | 4 | 550 | 2 | 548 | 99 | 99 |
| | | | Kinase | | | | | | | | | |
| mSK794 | 16 | 130 | Protein | CAMK | CAMKL | M ARK | 1 | 439 | 1 | 439 | 82 | 73 |
| | | | Kinase | | | | | | | | | |
| mSK798 | 17 | 131 | Protein | CAMK | CAMKL | M ARK | 3 | 174 | 92 | 272 | 50 | 14 |
| | | | Kinase | | | | | | | | | |
| mSK801 | 18 | 132 | Protein | CAMK | CAMKL | M ARK | 1 | 483 | 1 | 499 | 61 | 61 |
| | | | Kinase | | | | | | | | | |
| mSK804 | 19 | 133 | Protein | CAMK | CAMKL | M ARK | 1 | 483 | 1 | 499 | 61 | 60 |
| | | | Kinase | | | | | | | | | |
| mSK805 | 20 | 134 | Protein | CAMK | CAMKL | M ARK | 1 | 304 | 1 | 231 | 74 | 97 |
| | | | Kinase | | | | | | | | | |
| mSK807 | 21 | 135 | Protein | CAMK | CAMKL | M ARK | 1 | 439 | 1 | 438 | 81 | 72 |
| | | | Kinase | | | | | | | | | |
| mSK808 | 22 | 136 | Protein | CAMK | CAMKL | M ARK | 4 | 238 | 179 | 415 | 70 | 28 |
| | | | Kinase | | | | | | | | | |
| mSK809 | 23 | 137 | Protein | CAMK | CAMKL | M ARK | 76 | 474 | 1 | 399 | 84 | 98 |
| | | | Kinase | | | | | | | | | |
| mSK811 | 24 | 138 | Protein | CAMK | CAMKL | M ARK | 2 | 303 | 72 | 379 | 65 | 28 |
| | | | Kinase | | | | | | | | | |
| mSK813 | 25 | 139 | Protein | CAMK | CAMKL | M ARK | 32 | 218 | 1 | 199 | 67 | 24 |
| | | | Kinase | | | | | | | | | |
| mSK814 | 26 | 140 | Protein | CAMK | CAMKL | M ARK | 1 | 207 | 1 | 207 | 70 | 42 |
| | | | Kinase | | | | | | | | | |
| mSK815 | 27 | 141 | Protein | CAMK | CAMKL | M ARK | 16 | 384 | 1 | 277 | 72 | 100 |
| | | | Kinase | | | | | | | | | |
| mSK817 | 28 | 142 | Protein | CAMK | CAMKL | M ARK | 5 | 144 | 1 | 140 | 79 | 67 |
| | | | Kinase | | | | | | | | | |
| mSK822 | 29 | 143 | Protein | CAMK | CAMKL | M ARK | 32 | 611 | 1 | 602 | 73 | 70 |
| | | | Kinase | | | | | | | | | |
| mSK823 | 30 | 144 | Protein | CAMK | CAMKL | M ARK | 22 | 375 | 92 | 444 | 44 | 28 |
| | | | Kinase | | | | | | | | | |
| mSK826 | 31 | 145 | Protein | CAMK | CAMKL | M ARK | 12 | 491 | 1 | 480 | 92 | 90 |
| | | | Kinase | | | | | | | | | |
| mSK836 | 32 | 146 | Protein | CAMK | CAMKL | M ARK | 13 | 256 | 7 | 247 | 82 | 69 |
| | | | Kinase | | | | | | | | | |
| mSK838 | 33 | 147 | Protein | CAMK | CAMKL | M ARK | 1 | 437 | 1 | 438 | 60 | 58 |
| | | | Kinase | | | | | | | | | |
| mSK840 | 34 | 148 | Protein | CAMK | CAMKL | M ARK | 12 | 514 | 1 | 508 | 89 | 90 |
| | | | Kinase | | | | | | | | | |
| mSK843 | 35 | 149 | Protein | CAMK | CAMKL | M ARK | 1 | 322 | 1 | 322 | 93 | 56 |
| | | | Kinase | | | | | | | | | |
| NuaK1 | 36 | 150 | Protein | CAMK | CAMKL | NuaK | 1 | 658 | 1 | 754 | 97 | 85 |
| | | | Kinase | | | | | | | | | |
| QSK | 37 | 151 | Protein | CAMK | CAMKL | QIK | 2 | 1356 | 65 | 1371 | 88 | 87 |
| | | | Kinase | | | | | | | | | |
| DCAMKL1 | 38 | 152 | Protein | CAMK | DCAMKL | | 1 | 745 | 1 | 729 | 96 | 98 |
| | | | Kinase | | | | | | | | | |
| MNK2 | 39 | 153 | Protein | CAMK | MAPKAPK | MNK | 1 | 459 | 8 | 472 | 94 | 91 |
| | | | Kinase | | | | | | | | | |
| smMLCK | 40 | 154 | Protein | CAMK | MLCK | | 1 | 1950 | 1 | 1950 | 99 | 99 |
| | | | Kinase | | | | | | | | | |
| TTN | 41 | 155 | Protein | CAMK | MLCK | | | | | | 0 | 0 |
| | | | Kinase | | | | | | | | | |
| skMLCK | 42 | 156 | Protein | CAMK | MLCK | | 1 | 613 | 1 | 610 | 92 | 92 |
| | | | Kinase | | | | | | | | | |
| SgK085 | 43 | 157 | Protein | CAMK | MLCK | | 78 | 372 | 366 | 660 | 76 | 39 |
| | | | Kinase | | | | | | | | | |
| PIM2 | 44 | 158 | Protein | CAMK | PIM | | 42 | 411 | 1 | 370 | 90 | 100 |
| | | | Kinase | | | | | | | | | |
| Trio | 45 | 159 | Protein | CAMK | Trio | | 60 | 3103 | 1 | 3038 | 92 | 94 |
| | | | Kinase | | | | | | | | | |
| Trad | 46 | 160 | Protein | CAMK | Trio | | 1 | 2960 | 5 | 2959 | 98 | 98 |
| | | | Kinase | | | | | | | | | |
| SPEG | 47 | 161 | Protein | CAMK | Trio | | 1 | 3262 | 1 | 3262 | 99 | 99 |
| | | | Kinase | | | | | | | | | |
| Obscurin | 48 | 162 | Protein | CAMK | Trio | | 1 | 6801 | 6 | 6225 | 59 | 76 |
| | | | Kinase | | | | | | | | | |
| TSSK5 | 49 | 163 | Protein | CAMK | TSSK | | 1 | 372 | 95 | 457 | 91 | 74 |
| | | | Kinase | | | | | | | | | |
| CK1g3 | 50 | 164 | Protein | CK1 | CK1 | | 1 | 448 | 1 | 448 | 100 | 100 |
| | | | Kinase | | | | | | | | | |
| TTBK2 | 51 | 165 | Protein | CK1 | TTBK | | 74 | 1243 | 54 | 1649 | 84 | 63 |
| | | | Kinase | | | | | | | | | |
| TTBK1 | 52 | 166 | Protein | CK1 | TTBK | | 52 | 1308 | 1 | 1270 | 87 | 89 |
| | | | Kinase | | | | | | | | | |
| CHED | 53 | 167 | Protein | CMGC | CDK | CRK7 | 1 | 1511 | 1 | 1512 | 95 | 95 |
| | | | Kinase | | | | | | | | | |
| PFTAIRE2 | 54 | 168 | Protein | CMGC | CDK | TAIRE | 51 | 433 | 2 | 384 | 81 | 92 |
| | | | Kinase | | | | | | | | | |
| CDKL5 | 55 | 169 | Protein | CMGC | CDKL | | 1 | 904 | 1 | 904 | 96 | 84 |
| | | | Kinase | | | | | | | | | |
| CDKL4 | 56 | 170 | Protein | CMGC | CDKL | | 1 | 309 | 1 | 315 | 77 | 68 |
| | | | Kinase | | | | | | | | | |
| DYRK4 | 57 | 171 | Protein | CMGC | DYRK | DYRK2 | 1 | 592 | 74 | 632 | 94 | 88 |
| | | | Kinase | | | | | | | | | |
| HIPK4 | 58 | 172 | Protein | CMGC | DYRK | HIPK | 1 | 541 | 1 | 616 | 98 | 86 |
| | | | Kinase | | | | | | | | | |
| ERK4 | 59 | 173 | Protein | CMGC | MAPK | ERK | 1 | 522 | 1 | 526 | 82 | 86 |
| | | | Kinase | | | | | | | | | |
| AAK1 | 60 | 174 | Protein | Other | NAK | | 1 | 833 | 1 | 836 | 79 | 88 |
| | | | Kinase | | | | | | | | | |
| NEK1 | 61 | 175 | Protein | Other | NEK | | 1 | 1275 | 8 | 1265 | 81 | 81 |
| | | | Kinase | | | | | | | | | |
| NEK5 | 62 | 176 | Protein | Other | NEK | | 1 | 778 | 1 | 614 | 76 | 96 |
| | | | Kinase | | | | | | | | | |
| NEK10 | 63 | 177 | Protein | Other | NEK | | 45 | 1001 | 781 | 1887 | 77 | 45 |
| | | | Kinase | | | | | | | | | |
| SgK069 | 64 | 178 | Protein | Other | NKF1 | | 1 | 317 | 174 | 490 | 84 | 51 |
| | | | Kinase | | | | | | | | | |
| SgK110 | 65 | 179 | Protein | Other | NKF1 | | 5 | 191 | 35 | 221 | 78 | 19 |
| | | | Kinase | | | | | | | | | |
| SgK223 | 66 | 180 | Protein | Other | NKF3 | | 196 | 1373 | 1 | 1178 | 86 | 100 |
| | | | Kinase | | | | | | | | | |
| SgK269 | 67 | 181 | Protein | Other | NKF3 | | 1 | 1102 | 1 | 1100 | 60 | 83 |
| | | | Kinase | | | | | | | | | |
| CLIK1 | 68 | 182 | Protein | Other | NKF4 | | 17 | 539 | 1 | 517 | 85 | 88 |
| | | | Kinase | | | | | | | | | |
| SgK307 | 69 | 183 | Protein | Other | NKF5 | | 219 | 1450 | 1 | 1232 | 85 | 100 |
| | | | Kinase | | | | | | | | | |
| SgK424 | 70 | 184 | Protein | Other | NKF5 | | 91 | 469 | 8 | 375 | 67 | 78 |
| | | | Kinase | | | | | | | | | |
| NRBP2 | 71 | 185 | Protein | Other | NRBP | | 1 | 499 | 1 | 535 | 100 | 93 |
| | | | Kinase | | | | | | | | | |
| SgK493 | 72 | 186 | Protein | Other | Other- | | 114 | 491 | 299 | 677 | 72 | 52 |
| | | | Kinase | | Unique | | | | | | | |
| SgK496 | 73 | 187 | Protein | Other | Other- | | 23 | 913 | 1 | 851 | 88 | 66 |
| | | | Kinase | | Unique | | | | | | | |
| SgK071 | 74 | 188 | Protein | Other | Other- | | 69 | 626 | 6 | 682 | 69 | 60 |
| | | | Kinase | | Unique | | | | | | | |
| SgK384 | 75 | 189 | Protein | Other | PLK | | 219 | 599 | 1 | 381 | 63 | 100 |
| | | | Kinase | | | | | | | | | |
| Fused | 76 | 190 | Protein | Other | ULK | | 1 | 1315 | 1 | 1314 | 85 | 85 |
| | | | Kinase | | | | | | | | | |
| ULK3 | 77 | 191 | Protein | Other | ULK | | 1 | 472 | 44 | 515 | 94 | 86 |
| | | | Kinase | | | | | | | | | |
| ULK4 | 78 | 192 | Protein | Other | ULK | | 1 | 878 | 1 | 878 | 69 | 96 |
| | | | Kinase | | | | | | | | | |
| PIK3R4 | 79 | 193 | Protein | Other | VPS15 | | 1 | 1358 | 1 | 1358 | 96 | 96 |
| | | | Kinase | | | | | | | | | |
| Wee1B | 80 | 194 | Protein | Other | WEE | | 192 | 555 | 10 | 376 | 59 | 88 |
| | | | Kinase | | | | | | | | | |
| Wnk2 | 81 | 195 | Protein | Other | Wnk | | 1 | 2114 | 12 | 2275 | 89 | 83 |
| | | | Kinase | | | | | | | | | |
| Wnk1 | 82 | 196 | Protein | Other | Wnk | | 1 | 2377 | 1 | 2382 | 86 | 86 |
| | | | Kinase | | | | | | | | | |
| Wnk3 | 83 | 197 | Protein | Other | Wnk | | 1 | 1751 | 1 | 1743 | 80 | 80 |
| | | | Kinase | | | | | | | | | |
| HSER | 84 | 198 | Protein | RGC | RGC | | 1 | 1066 | 1 | 1072 | 94 | 93 |
| | | | Kinase | | | | | | | | | |
| CYGX | 85 | 199 | Protein | RGC | RGC | | 1 | 908 | 192 | 1105 | 94 | 77 |
| | | | Kinase | | | | | | | | | |
| KSGC | 86 | 200 | Protein | RGC | RGC | | 1 | 1101 | 1 | 1100 | 88 | 88 |
| | | | Kinase | | | | | | | | | |
| MAP3K6 | 87 | 201 | Protein | STE | STE11 | | 1 | 1291 | 1 | 1289 | 97 | 97 |
| | | | Kinase | | | | | | | | | |
| MAP3K8 | 88 | 202 | Protein | STE | STE11 | | 1 | 1367 | 1 | 1454 | 96 | 91 |
| | | | Kinase | | | | | | | | | |
| MAP3K7 | 89 | 203 | Protein | STE | STE11 | | 122 | 1278 | 1 | 1157 | 87 | 100 |
| | | | Kinase | | | | | | | | | |
| OSR1 | 90 | 204 | Protein | STE | STE20 | FRAY | 1 | 527 | 1 | 527 | 96 | 96 |
| | | | Kinase | | | | | | | | | |
| ZC1 | 91 | 205 | Protein | STE | STE20 | MSN | 1 | 1328 | 1 | 1233 | 93 | 100 |
| | | | Kinase | | | | | | | | | |
| ZC2 | 92 | 206 | Protein | STE | STE20 | MSN | 1 | 1351 | 1 | 1352 | 99 | 99 |
| | | | Kinase | | | | | | | | | |
| ZC4 | 93 | 207 | Protein | STE | STE20 | MSN | 1 | 1539 | 1 | 1455 | 94 | 100 |
| | | | Kinase | | | | | | | | | |
| MYO3B | 94 | 208 | Protein | STE | STE20 | NinaC | 1 | 1106 | 13 | 1124 | 62 | 75 |
| | | | Kinase | | | | | | | | | |
| PAK6 | 95 | 209 | Protein | STE | STE20 | PAKB | 1 | 682 | 1 | 681 | 98 | 98 |
| | | | Kinase | | | | | | | | | |
| STLK5 | 96 | 210 | Protein | STE | STE20 | STLK | 1 | 431 | 1 | 431 | 95 | 95 |
| | | | Kinase | | | | | | | | | |
| TAO2 | 97 | 211 | Protein | STE | STE20 | TAO | 1 | 1240 | 1 | 1235 | 98 | 98 |
| | | | Kinase | | | | | | | | | |
| TAO3 | 98 | 212 | Protein | STE | STE20 | TAO | 1 | 898 | 1 | 898 | 96 | 96 |
| | | | Kinase | | | | | | | | | |
| TIF1g | 99 | 213 | atyp PK | TIF1 | | | 1 | 1142 | 5 | 1131 | 95 | 96 |
| ErbB3 | 100 | 214 | Protein | TK | EGFR | | 1 | 1338 | 1 | 1338 | 97 | 97 |
| | | | Kinase | | | | | | | | | |
| EphA5 | 101 | 215 | Protein | TK | Eph | | 1 | 1040 | 1 | 1036 | 96 | 96 |
| | | | Kinase | | | | | | | | | |
| EphA6 | 102 | 216 | Protein | TK | Eph | | 96 | 1130 | 1 | 1035 | 92 | 100 |
| | | | Kinase | | | | | | | | | |
| LMR2 | 103 | 217 | Protein | TK | Lmr | | 1 | 1469 | 1 | 1503 | 78 | 76 |
| | | | Kinase | | | | | | | | | |
| LMR3 | 104 | 218 | Protein | TK | Lmr | | 1 | 1431 | 1 | 1460 | 80 | 78 |
| | | | Kinase | | | | | | | | | |
| FGR | 105 | 219 | Protein | TK | Src | | 1 | 517 | 1 | 517 | 100 | 100 |
| | | | Kinase | | | | | | | | | |
| LRRK2 | 106 | 220 | Protein | TKL | LRRK | | 1057 | 2478 | 1 | 1471 | 51 | 86 |
| | | | Kinase | | | | | | | | | |
| LRRK1 | 107 | 221 | Protein | TKL | LRRK | | 22 | 2004 | 104 | 2108 | 95 | 87 |
| | | | Kinase | | | | | | | | | |
| LZK | 108 | 222 | Protein | TKL | MLK | LZK | 1 | 959 | 1 | 966 | 90 | 89 |
| | | | Kinase | | | | | | | | | |
| MLK2 | 109 | 223 | Protein | TKL | MLK | MLK | 1 | 940 | 1 | 1018 | 98 | 90 |
| | | | Kinase | | | | | | | | | |
| BRAF | 110 | 224 | Protein | TKL | RAF | | 25 | 784 | 6 | 765 | 95 | 97 |
| | | | Kinase | | | | | | | | | |
| KSR2 | 111 | 225 | Protein | TKL | RAF | | 335 | 755 | 25 | 436 | 41 | 91 |
| | | | Kinase | | | | | | | | | |

| | | | | | | | | | |
|---|---|---|---|---|---|---|---|---|---|
| DGKd | 112 | 226 | Lipid Kinase | 1 | 1158 | 40 | 1195 | 94 | 91 |
| DGKi | 113 | 227 | Lipid Kinase | 1 | 1041 | 1 | 1050 | 97 | 96 |
| DGKq | 114 | 228 | Lipid Kinase | 1 | 934 | 1 | 994 | 96 | 91 |

[0464] Table 3 describes the extent and the boundaries of the kinase catalytic domains, and other protein domains. These domains were identified using PFAM (pfam.wustl.edu/hmmsearch.shtml) models, a large collection of multiple sequence alignments and hidden Markov models covering many common protein domains. Version Pfam 7.4 (October 2002) contains alignments and models for 4463 protein families. The PFAM alignments were downloaded from pfam.wustl.edu/hmmsearch.shtml and the HMMr searches were run locally on a Timelogic computer (TimeLogic Corporation, Incline Village, Nev.). The column headings are: “Gene”, “ID#na”, “ID#aa ”, “Profile Description”, “Profile Accession”, “Pscore”, “Domain Start”, “Domain End”, “Prof Start”, “Prof End”, “Profile Length”, and “Query Length”. The “Profile Description” column contains the name of the protein domain; “Profile Accession” refers to the PFAM accession number for the domain; “Pscore” lists the probability score, or E-value, and is the number of hits that would be expected to have a score equal or better by chance alone. A good E-value is much less than 1. Around 1 is what is expected just by chance; “Domain Start” lists the amino acid number within the protein sequence at which the domain begins; “Domain End” lists the amino acid number within the protein sequence at which the domain ends; “Prof Start” (Profile Start) refers to the position within the profile at which it begins alignment with the patent sequence; “Prof End” (Profile End) lists the position within the profile at which it the alignment with the patent sequence ends; “Profile Length” lists the length in amino acid residues of the PFAM profile; and “Query Length” lists the amino acid length of the patent protein.

TABLE 3

| | ID# | ID# | | Profile | | Domain | Domain | Prof | Prof | Profile | Query |
|---|---|---|---|---|---|---|---|---|---|---|---|
| Gene | na | aa | Profile Description | Accession | Pscore | Start | End | Start | End | Length | Length |
| DMPK2 | 1 | 115 | Protein kinase domain | PF00069 | 2.50E−64 | 71 | 337 | 1 | 294 | 294 | 1556 |
| DMPK2 | 1 | 115 | Phorbol esters/diacylglycerol | PF00130 | 9.20E−13 | 884 | 932 | 1 | 51 | 51 | 1556 |
| | | | binding domain (C1 domain) | | | | | | | | |
| DMPK2 | 1 | 115 | PH domain | PF00169 | 9.40E−11 | 953 | 1071 | 1 | 85 | 85 | 1556 |
| DMPK2 | 1 | 115 | CNH domain | PF00780 | 3.00E−48 | 1098 | 1371 | 1 | 362 | 362 | 1556 |
| MRCKb | 2 | 116 | Protein kinase domain | PF00069 | 3.60E−64 | 76 | 342 | 1 | 294 | 294 | 1713 |
| MRCKb | 2 | 116 | Phorbol esters/diacylglycerol | PF00130 | 1.50E−14 | 1027 | 1076 | 1 | 51 | 51 | 1713 |
| | | | binding domain (C1 domain) | | | | | | | | |
| MRCKb | 2 | 116 | PH domain | PF00169 | 0.000003 | 1097 | 1215 | 1 | 85 | 85 | 1713 |
| MRCKb | 2 | 116 | Protein kinase C terminal | PF00433 | 0.000031 | 343 | 371 | 1 | 31 | 70 | 1713 |
| | | | domain | | | | | | | | |
| MRCKb | 2 | 116 | CNH domain | PF00780 | 1.90E−96 | 1242 | 1515 | 1 | 362 | 362 | 1713 |
| MAST3 | 3 | 117 | Protein kinase domain | PF00069 | 6.20E−72 | 389 | 662 | 1 | 294 | 294 | 1321 |
| MAST3 | 3 | 117 | PDZ domain | PF00595 | 1.50E−09 | 966 | 1048 | 1 | 79 | 84 | 1321 |
| MAST1 | 4 | 118 | Protein kinase domain | PF00069 | 4.10E−67 | 376 | 649 | 1 | 294 | 294 | 1570 |
| MAST1 | 4 | 118 | PDZ domain | PF00595 | 7.50E−10 | 969 | 1052 | 1 | 80 | 84 | 1570 |
| LATS1 | 5 | 119 | Protein kinase domain | PF00069 | 1.20E−67 | 704 | 850 | 1 | 149 | 294 | 1129 |
| LATS1 | 5 | 119 | Protein kinase domain | PF00069 | 1.20E−67 | 906 | 1009 | 157 | 294 | 294 | 1129 |
| LATS1 | 5 | 119 | UBA domain | PF00627 | 3.40E−08 | 101 | 141 | 1 | 45 | 45 | 1129 |
| PKN1 | 6 | 120 | Protein kinase domain | PF00069 | 1.40E−81 | 619 | 878 | 1 | 294 | 294 | 946 |
| PKN1 | 6 | 120 | Protein kinase C terminal | PF00433 | 5.80E−17 | 879 | 943 | 1 | 64 | 70 | 946 |
| | | | domain | | | | | | | | |
| PKN1 | 6 | 120 | HR1 repeat | PF02185 | 6.30E−56 | 37 | 110 | 1 | 87 | 87 | 946 |
| PKN1 | 6 | 120 | HR1 repeat | PF02185 | 6.30E−56 | 126 | 186 | 1 | 70 | 87 | 946 |
| PKN1 | 6 | 120 | HR1 repeat | PF02185 | 6.30E−56 | 216 | 294 | 1 | 87 | 87 | 946 |
| SGK494 | 7 | 121 | Protein kinase domain | PF00069 | 6.70E−60 | 100 | 352 | 1 | 294 | 294 | 395 |
| RSKL1 | 8 | 122 | Protein kinase domain | PF00069 | 1.30E−18 | 878 | 990 | 85 | 201 | 294 | 1056 |
| RSKL1 | 8 | 122 | Protein kinase domain | PF00069 | 1.30E−18 | 1010 | 1046 | 260 | 294 | 294 | 1056 |
| RSKL1 | 8 | 122 | MIT domain | PF04212 | 3.10E−18 | 235 | 304 | 1 | 74 | 74 | 1056 |
| RSKL1 | 8 | 122 | PX domain | PF00787 | 3.50E−13 | 9 | 128 | 1 | 134 | 134 | 1056 |
| ADCK4 | 9 | 123 | ABC1 Family | PF03109 | 1.40E−42 | 198 | 314 | 1 | 124 | 124 | 533 |
| ADCK5 | 10 | 124 | ABC1 Family | PF03109 | 1.00E−45 | 188 | 304 | 1 | 124 | 124 | 582 |
| AlphaK2 | 11 | 125 | Immunoglobulin domain | PF00047 | 0.000166 | 1302 | 1361 | 1 | 50 | 50 | 1672 |
| AlphaK2 | 11 | 125 | Alpha Kinase | PF02816 | 1.70E−08 | 1508 | 1626 | 116 | 251 | 251 | 1672 |
| AlphaK3 | 12 | 126 | Alpha Kinase | PF02816 | 7.00E−136 | 1000 | 1215 | 1 | 251 | 251 | 1231 |
| BCR | 13 | 127 | PH domain | PF00169 | 0.000035 | 708 | 865 | 1 | 85 | 85 | 1270 |
| BCR | 13 | 127 | C2 domain | PF00168 | 6.60E−12 | 912 | 1001 | 1 | 88 | 88 | 1270 |
| BCR | 13 | 127 | RhoGAP domain | PF00620 | 4.40E−78 | 1067 | 1220 | 1 | 170 | 170 | 1270 |
| BCR | 13 | 127 | RhoGEF domain | PF00621 | 5.80E−84 | 501 | 689 | 1 | 207 | 207 | 1270 |
| ATR | 14 | 128 | FAT domain | PF02259 | 1.20E−188 | 1634 | 2179 | 1 | 722 | 722 | 2635 |
| ATR | 14 | 128 | FATC domain | PF02260 | 2.10E−20 | 2603 | 2635 | 1 | 33 | 33 | 2635 |
| ATR | 14 | 128 | Phosphatidylinositol 3- and | PF00454 | 3.10E−118 | 2312 | 2558 | 1 | 286 | 286 | 2635 |
| | | | 4-kinase | | | | | | | | |
| AMPKa1 | 15 | 129 | Protein kinase domain | PF00069 | 1.20E−93 | 18 | 270 | 1 | 294 | 294 | 550 |
| mSK794 | 16 | 130 | Protein kinase domain | PF00069 | 1.80E−56 | 14 | 262 | 1 | 294 | 294 | 481 |
| mSK798 | 17 | 131 | Protein kinase domain | PF00069 | 7.10E−09 | 3 | 65 | 74 | 138 | 294 | 177 |
| mSK798 | 17 | 131 | Protein kinase domain | PF00069 | 7.10E−09 | 142 | 173 | 260 | 294 | 294 | 177 |
| mSK801 | 18 | 132 | Protein kinase domain | PF00069 | 6.90E−83 | 14 | 263 | 1 | 294 | 294 | 492 |
| mSK804 | 19 | 133 | Protein kinase domain | PF00069 | 3.40E−77 | 14 | 264 | 1 | 294 | 294 | 492 |
| mSK805 | 20 | 134 | Protein kinase domain | PF00069 | 8.60E−20 | 20 | 93 | 1 | 84 | 294 | 304 |
| mSK805 | 20 | 134 | Protein kinase domain | PF00069 | 8.60E−20 | 129 | 249 | 122 | 279 | 294 | 304 |
| mSK807 | 21 | 135 | Protein kinase domain | PF00069 | 4.90E−61 | 14 | 263 | 1 | 294 | 294 | 477 |
| mSK808 | 22 | 136 | Protein kinase domain | PF00069 | 1.10E−64 | 19 | 238 | 1 | 264 | 294 | 238 |
| mSK809 | 23 | 137 | Protein kinase domain | PF00069 | 4.40E−57 | 14 | 262 | 1 | 294 | 294 | 474 |
| mSK811 | 24 | 138 | Protein kinase domain | PF00069 | 5.90E−43 | 4 | 97 | 1 | 99 | 294 | 306 |
| mSK811 | 24 | 138 | Protein kinase domain | PF00069 | 5.90E−43 | 115 | 248 | 119 | 294 | 294 | 306 |
| mSK813 | 25 | 139 | Protein kinase domain | PF00069 | 6.90E−43 | 55 | 172 | 1 | 124 | 294 | 232 |
| mSK813 | 25 | 139 | Protein kinase domain | PF00069 | 6.90E−43 | 173 | 213 | 138 | 180 | 294 | 232 |
| mSK814 | 26 | 140 | Protein kinase domain | PF00069 | 5.90E−61 | 14 | 198 | 1 | 192 | 294 | 209 |
| mSK815 | 27 | 141 | Protein kinase domain | PF00069 | 1.80E−45 | 38 | 218 | 1 | 188 | 294 | 384 |
| mSK815 | 27 | 141 | Protein kinase domain | PF00069 | 1.80E−45 | 252 | 282 | 261 | 294 | 294 | 384 |
| mSK817 | 28 | 142 | Protein kinase domain | PF00069 | 7.10E−40 | 2 | 160 | 1 | 166 | 294 | 178 |
| mSK822 | 29 | 143 | Protein kinase domain | PF00069 | 5.10E−85 | 55 | 302 | 1 | 294 | 294 | 617 |
| mSK823 | 30 | 144 | Protein kinase domain | PF00069 | 1.50E−84 | 23 | 271 | 1 | 294 | 294 | 411 |
| mSK826 | 31 | 145 | Protein kinase domain | PF00069 | 7.50E−71 | 25 | 273 | 1 | 294 | 294 | 520 |
| mSK836 | 32 | 146 | Protein kinase domain | PF00069 | 4.60E−59 | 39 | 216 | 1 | 183 | 294 | 261 |
| mSK838 | 33 | 147 | Protein kinase domain | PF00069 | 8.40E−90 | 14 | 262 | 1 | 294 | 294 | 476 |
| mSK840 | 34 | 148 | Protein kinase domain | PF00069 | 2.90E−75 | 39 | 282 | 1 | 294 | 294 | 514 |
| mSK843 | 35 | 149 | Protein kinase domain | PF00069 | 1.80E−56 | 14 | 262 | 1 | 294 | 294 | 322 |
| NuaK1 | 36 | 150 | Protein kinase domain | PF00069 | 1.70E−96 | 56 | 307 | 1 | 294 | 294 | 658 |
| QSK | 37 | 151 | Protein kinase domain | PF00069 | 7.40E−99 | 53 | 304 | 1 | 294 | 294 | 1356 |
| DCAMKL1 | 38 | 152 | Protein kinase domain | PF00069 | 8.50E−96 | 406 | 663 | 1 | 294 | 294 | 745 |
| DCAMKL1 | 38 | 152 | Doublecortin | PF03607 | 3.70E−55 | 74 | 138 | 1 | 67 | 67 | 745 |
| DCAMKL1 | 38 | 152 | Doublecortin | PF03607 | 3.70E−55 | 203 | 264 | 1 | 67 | 67 | 745 |
| MNK2 | 39 | 153 | Protein kinase domain | PF00069 | 7.90E−74 | 83 | 368 | 1 | 294 | 294 | 459 |
| smMLCK | 40 | 154 | Fibronectin type III domain | PF00041 | 9.90E−23 | 1362 | 1447 | 1 | 84 | 84 | 1950 |
| smMLCK | 40 | 154 | Immunoglobulin domain | PF00047 | 7.20E−78 | 56 | 117 | 1 | 50 | 50 | 1950 |
| smMLCK | 40 | 154 | Immunoglobulin domain | PF00047 | 7.20E−78 | 179 | 239 | 1 | 50 | 50 | 1950 |
| smMLCK | 40 | 154 | Immunoglobulin domain | PF00047 | 7.20E−78 | 425 | 486 | 1 | 50 | 50 | 1950 |
| smMLCK | 40 | 154 | Immunoglobulin domain | PF00047 | 7.20E−78 | 525 | 582 | 1 | 50 | 50 | 1950 |
| smMLCK | 40 | 154 | Immunoglobulin domain | PF00047 | 7.20E−78 | 634 | 694 | 1 | 50 | 50 | 1950 |
| smMLCK | 40 | 154 | Immunoglobulin domain | PF00047 | 7.20E−78 | 732 | 789 | 1 | 46 | 50 | 1950 |
| smMLCK | 40 | 154 | Immunoglobulin domain | PF00047 | 7.20E−78 | 1143 | 1203 | 1 | 50 | 50 | 1950 |
| smMLCK | 40 | 154 | Immunoglobulin domain | PF00047 | 7.20E−78 | 1854 | 1915 | 1 | 50 | 50 | 1950 |
| smMLCK | 40 | 154 | Protein kinase domain | PF00069 | 3.80E−97 | 1495 | 1750 | 1 | 294 | 294 | 1950 |
| TTN | 41 | 155 | Fibronectin type III domain | PF00041 | 0 | 16583 | 16669 | 1 | 84 | 84 | 36946 |
| TTN | 41 | 155 | Fibronectin type III domain | PF00041 | 0 | 16684 | 16770 | 1 | 84 | 84 | 36946 |
| TTN | 41 | 155 | Fibronectin type III domain | PF00041 | 0 | 16785 | 16871 | 1 | 84 | 84 | 36946 |
| TTN | 41 | 155 | Fibronectin type III domain | PF00041 | 0 | 16981 | 17066 | 1 | 84 | 84 | 36946 |
| TTN | 41 | 155 | Fibronectin type III domain | PF00041 | 0 | 17081 | 17166 | 1 | 84 | 84 | 36946 |
| TTN | 41 | 155 | Fibronectin type III domain | PF00041 | 0 | 17277 | 17362 | 1 | 84 | 84 | 36946 |
| TTN | 41 | 155 | Fibronectin type III domain | PF00041 | 0 | 17376 | 17462 | 1 | 84 | 84 | 36946 |
| TTN | 41 | 155 | Fibronectin type III domain | PF00041 | 0 | 17477 | 17562 | 1 | 84 | 84 | 36946 |
| TTN | 41 | 155 | Fibronectin type III domain | PF00041 | 0 | 17577 | 17662 | 1 | 84 | 84 | 36946 |
| TTN | 41 | 155 | Fibronectin type III domain | PF00041 | 0 | 17677 | 17763 | 1 | 84 | 84 | 36946 |
| TTN | 41 | 155 | Fibronectin type III domain | PF00041 | 0 | 17778 | 17865 | 1 | 84 | 84 | 36946 |
| TTN | 41 | 155 | Fibronectin type III domain | PF00041 | 0 | 17973 | 18058 | 1 | 84 | 84 | 36946 |
| TTN | 41 | 155 | Fibronectin type III domain | PF00041 | 0 | 18073 | 18159 | 1 | 84 | 84 | 36946 |
| TTN | 41 | 155 | Fibronectin type III domain | PF00041 | 0 | 18295 | 18382 | 1 | 84 | 84 | 36946 |
| TTN | 41 | 155 | Fibronectin type III domain | PF00041 | 0 | 18396 | 18481 | 1 | 84 | 84 | 36946 |
| TTN | 41 | 155 | Fibronectin type III domain | PF00041 | 0 | 18495 | 18581 | 1 | 84 | 84 | 36946 |
| TTN | 41 | 155 | Fibronectin type III domain | PF00041 | 0 | 18697 | 18781 | 1 | 84 | 84 | 36946 |
| TTN | 41 | 155 | Fibronectin type III domain | PF00041 | 0 | 18795 | 18881 | 1 | 84 | 84 | 36946 |
| TTN | 41 | 155 | Fibronectin type III domain | PF00041 | 0 | 18998 | 19082 | 1 | 84 | 84 | 36946 |
| TTN | 41 | 155 | Fibronectin type III domain | PF00041 | 0 | 19099 | 19190 | 1 | 84 | 84 | 36946 |
| TTN | 41 | 155 | Fibronectin type III domain | PF00041 | 0 | 19205 | 19293 | 1 | 84 | 84 | 36946 |
| TTN | 41 | 155 | Fibronectin type III domain | PF00041 | 0 | 19412 | 19497 | 1 | 84 | 84 | 36946 |
| TTN | 41 | 155 | Fibronectin type III domain | PF00041 | 0 | 19512 | 19603 | 1 | 84 | 84 | 36946 |
| TTN | 41 | 155 | Fibronectin type III domain | PF00041 | 0 | 19717 | 19803 | 1 | 84 | 84 | 36946 |
| TTN | 41 | 155 | Fibronectin type III domain | PF00041 | 0 | 19817 | 19907 | 1 | 84 | 84 | 36946 |
| TTN | 41 | 155 | Fibronectin type III domain | PF00041 | 0 | 19921 | 20007 | 1 | 84 | 84 | 36946 |
| TTN | 41 | 155 | Fibronectin type III domain | PF00041 | 0 | 20116 | 20202 | 1 | 84 | 84 | 36946 |
| TTN | 41 | 155 | Fibronectin type III domain | PF00041 | 0 | 20217 | 20303 | 1 | 84 | 84 | 36946 |
| TTN | 41 | 155 | Fibronectin type III domain | PF00041 | 0 | 20412 | 20495 | 1 | 84 | 84 | 36946 |
| TTN | 41 | 155 | Fibronectin type III domain | PF00041 | 0 | 20512 | 20598 | 1 | 84 | 84 | 36946 |
| TTN | 41 | 155 | Fibronectin type III domain | PF00041 | 0 | 20613 | 20701 | 1 | 84 | 84 | 36946 |
| TTN | 41 | 155 | Fibronectin type III domain | PF00041 | 0 | 20810 | 20895 | 1 | 84 | 84 | 36946 |
| TTN | 41 | 155 | Fibronectin type III domain | PF00041 | 0 | 20910 | 20994 | 1 | 84 | 84 | 36946 |
| TTN | 41 | 155 | Fibronectin type III domain | PF00041 | 0 | 21104 | 21190 | 1 | 84 | 84 | 36946 |
| TTN | 41 | 155 | Fibronectin type III domain | PF00041 | 0 | 21204 | 21289 | 1 | 84 | 84 | 36946 |
| TTN | 41 | 155 | Fibronectin type III domain | PF00041 | 0 | 21304 | 21391 | 1 | 84 | 84 | 36946 |
| TTN | 41 | 155 | Fibronectin type III domain | PF00041 | 0 | 21502 | 21586 | 1 | 84 | 84 | 36946 |
| TTN | 41 | 155 | Fibronectin type III domain | PF00041 | 0 | 21601 | 21684 | 1 | 84 | 84 | 36946 |
| TTN | 41 | 155 | Fibronectin type III domain | PF00041 | 0 | 21797 | 21882 | 1 | 84 | 84 | 36946 |
| TTN | 41 | 155 | Fibronectin type III domain | PF00041 | 0 | 21896 | 21982 | 1 | 84 | 84 | 36946 |
| TTN | 41 | 155 | Fibronectin type III domain | PF00041 | 0 | 21997 | 22089 | 1 | 84 | 84 | 36946 |
| TTN | 41 | 155 | Fibronectin type III domain | PF00041 | 0 | 22199 | 22284 | 1 | 84 | 84 | 36946 |
| TTN | 41 | 155 | Fibronectin type III domain | PF00041 | 0 | 22299 | 22385 | 1 | 84 | 84 | 36946 |
| TTN | 41 | 155 | Fibronectin type III domain | PF00041 | 0 | 22492 | 22578 | 1 | 84 | 84 | 36946 |
| TTN | 41 | 155 | Fibronectin type III domain | PF00041 | 0 | 22592 | 22678 | 1 | 84 | 84 | 36946 |
| TTN | 41 | 155 | Fibronectin type III domain | PF00041 | 0 | 22689 | 22778 | 1 | 84 | 84 | 36946 |
| TTN | 41 | 155 | Fibronectin type III domain | PF00041 | 0 | 22889 | 22974 | 1 | 84 | 84 | 36946 |
| TTN | 41 | 155 | Fibronectin type III domain | PF00041 | 0 | 22988 | 23074 | 1 | 84 | 84 | 36946 |
| TTN | 41 | 155 | Fibronectin type III domain | PF00041 | 0 | 23089 | 23176 | 1 | 84 | 84 | 36946 |
| TTN | 41 | 155 | Fibronectin type III domain | PF00041 | 0 | 23287 | 23372 | 1 | 84 | 84 | 36946 |
| TTN | 41 | 155 | Fibronectin type III domain | PF00041 | 0 | 23384 | 23467 | 1 | 84 | 84 | 36946 |
| TTN | 41 | 155 | Fibronectin type III domain | PF00041 | 0 | 23576 | 23664 | 1 | 84 | 84 | 36946 |
| TTN | 41 | 155 | Fibronectin type III domain | PF00041 | 0 | 23676 | 23762 | 1 | 84 | 84 | 36946 |
| TTN | 41 | 155 | Fibronectin type III domain | PF00041 | 0 | 23773 | 23861 | 1 | 84 | 84 | 36946 |
| TTN | 41 | 155 | Fibronectin type III domain | PF00041 | 0 | 23973 | 24058 | 1 | 84 | 84 | 36946 |
| TTN | 41 | 155 | Fibronectin type III domain | PF00041 | 0 | 24072 | 24158 | 1 | 84 | 84 | 36946 |
| TTN | 41 | 155 | Fibronectin type III domain | PF00041 | 0 | 24173 | 24260 | 1 | 84 | 84 | 36946 |
| TTN | 41 | 155 | Fibronectin type III domain | PF00041 | 0 | 24368 | 24453 | 1 | 84 | 84 | 36946 |
| TTN | 41 | 155 | Fibronectin type III domain | PF00041 | 0 | 24465 | 24549 | 1 | 84 | 84 | 36946 |
| TTN | 41 | 155 | Fibronectin type III domain | PF00041 | 0 | 24659 | 24745 | 1 | 84 | 84 | 36946 |
| TTN | 41 | 155 | Fibronectin type III domain | PF00041 | 0 | 24759 | 24845 | 1 | 84 | 84 | 36946 |
| TTN | 41 | 155 | Fibronectin type III domain | PF00041 | 0 | 24856 | 24944 | 1 | 84 | 84 | 36946 |
| TTN | 41 | 155 | Fibronectin type III domain | PF00041 | 0 | 25055 | 25141 | 1 | 84 | 84 | 36946 |
| TTN | 41 | 155 | Fibronectin type III domain | PF00041 | 0 | 25155 | 25241 | 1 | 84 | 84 | 36946 |
| TTN | 41 | 155 | Fibronectin type III domain | PF00041 | 0 | 25256 | 25343 | 1 | 84 | 84 | 36946 |
| TTN | 41 | 155 | Fibronectin type III domain | PF00041 | 0 | 25452 | 25537 | 1 | 84 | 84 | 36946 |
| TTN | 41 | 155 | Fibronectin type III domain | PF00041 | 0 | 25549 | 25591 | 1 | 42 | 84 | 36946 |
| TTN | 41 | 155 | Fibronectin type III domain | PF00041 | 0 | 25711 | 25794 | 1 | 84 | 84 | 36946 |
| TTN | 41 | 155 | Fibronectin type III domain | PF00041 | 0 | 25811 | 25897 | 1 | 84 | 84 | 36946 |
| TTN | 41 | 155 | Fibronectin type III domain | PF00041 | 0 | 25908 | 25996 | 1 | 84 | 84 | 36946 |
| TTN | 41 | 155 | Fibronectin type III domain | PF00041 | 0 | 26107 | 26193 | 1 | 84 | 84 | 36946 |
| TTN | 41 | 155 | Fibronectin type III domain | PF00041 | 0 | 26207 | 26293 | 1 | 84 | 84 | 36946 |
| TTN | 41 | 155 | Fibronectin type III domain | PF00041 | 0 | 26308 | 26395 | 1 | 84 | 84 | 36946 |
| TTN | 41 | 155 | Fibronectin type III domain | PF00041 | 0 | 26504 | 26589 | 1 | 84 | 84 | 36946 |
| TTN | 41 | 155 | Fibronectin type III domain | PF00041 | 0 | 26601 | 26685 | 1 | 84 | 84 | 36946 |
| TTN | 41 | 155 | Fibronectin type III domain | PF00041 | 0 | 26793 | 26876 | 1 | 84 | 84 | 36946 |
| TTN | 41 | 155 | Fibronectin type III domain | PF00041 | 0 | 26893 | 26979 | 1 | 84 | 84 | 36946 |
| TTN | 41 | 155 | Fibronectin type III domain | PF00041 | 0 | 26990 | 27078 | 1 | 84 | 84 | 36946 |
| TTN | 41 | 155 | Fibronectin type III domain | PF00041 | 0 | 27189 | 27275 | 1 | 84 | 84 | 36946 |
| TTN | 41 | 155 | Fibronectin type III domain | PF00041 | 0 | 27289 | 27375 | 1 | 84 | 84 | 36946 |
| TTN | 41 | 155 | Fibronectin type III domain | PF00041 | 0 | 27390 | 27477 | 1 | 84 | 84 | 36946 |
| TTN | 41 | 155 | Fibronectin type III domain | PF00041 | 0 | 27586 | 27671 | 1 | 84 | 84 | 36946 |
| TTN | 41 | 155 | Fibronectin type III domain | PF00041 | 0 | 27683 | 27767 | 1 | 84 | 84 | 36946 |
| TTN | 41 | 155 | Fibronectin type III domain | PF00041 | 0 | 27875 | 27958 | 1 | 84 | 84 | 36946 |
| TTN | 41 | 155 | Fibronectin type III domain | PF00041 | 0 | 27975 | 28061 | 1 | 84 | 84 | 36946 |
| TTN | 41 | 155 | Fibronectin type III domain | PF00041 | 0 | 28072 | 28160 | 1 | 84 | 84 | 36946 |
| TTN | 41 | 155 | Fibronectin type III domain | PF00041 | 0 | 28272 | 28358 | 1 | 84 | 84 | 36946 |
| TTN | 41 | 155 | Fibronectin type III domain | PF00041 | 0 | 28372 | 28458 | 1 | 84 | 84 | 36946 |
| TTN | 41 | 155 | Fibronectin type III domain | PF00041 | 0 | 28473 | 28560 | 1 | 84 | 84 | 36946 |
| TTN | 41 | 155 | Fibronectin type III domain | PF00041 | 0 | 28669 | 28754 | 1 | 84 | 84 | 36946 |
| TTN | 41 | 155 | Fibronectin type III domain | PF00041 | 0 | 28766 | 28850 | 1 | 84 | 84 | 36946 |
| TTN | 41 | 155 | Fibronectin type III domain | PF00041 | 0 | 28958 | 29043 | 1 | 84 | 84 | 36946 |
| TTN | 41 | 155 | Fibronectin type III domain | PF00041 | 0 | 29057 | 29143 | 1 | 84 | 84 | 36946 |
| TTN | 41 | 155 | Fibronectin type III domain | PF00041 | 0 | 29154 | 29242 | 1 | 84 | 84 | 36946 |
| TTN | 41 | 155 | Fibronectin type III domain | PF00041 | 0 | 29353 | 29439 | 1 | 84 | 84 | 36946 |
| TTN | 41 | 155 | Fibronectin type III domain | PF00041 | 0 | 29453 | 29539 | 1 | 84 | 84 | 36946 |
| TTN | 41 | 155 | Fibronectin type III domain | PF00041 | 0 | 29554 | 29639 | 1 | 84 | 84 | 36946 |
| TTN | 41 | 155 | Fibronectin type III domain | PF00041 | 0 | 29748 | 29833 | 1 | 84 | 84 | 36946 |
| TTN | 41 | 155 | Fibronectin type III domain | PF00041 | 0 | 29845 | 29929 | 1 | 84 | 84 | 36946 |
| TTN | 41 | 155 | Fibronectin type III domain | PF00041 | 0 | 30040 | 30123 | 1 | 84 | 84 | 36946 |
| TTN | 41 | 155 | Fibronectin type III domain | PF00041 | 0 | 30140 | 30226 | 1 | 84 | 84 | 36946 |
| TTN | 41 | 155 | Fibronectin type III domain | PF00041 | 0 | 30238 | 30325 | 1 | 84 | 84 | 36946 |
| TTN | 41 | 155 | Fibronectin type III domain | PF00041 | 0 | 30436 | 30522 | 1 | 84 | 84 | 36946 |
| TTN | 41 | 155 | Fibronectin type III domain | PF00041 | 0 | 30536 | 30622 | 1 | 84 | 84 | 36946 |
| TTN | 41 | 155 | Fibronectin type III domain | PF00041 | 0 | 30637 | 30724 | 1 | 84 | 84 | 36946 |
| TTN | 41 | 155 | Fibronectin type III domain | PF00041 | 0 | 30836 | 30921 | 1 | 84 | 84 | 36946 |
| TTN | 41 | 155 | Fibronectin type III domain | PF00041 | 0 | 30933 | 31017 | 1 | 84 | 84 | 36946 |
| TTN | 41 | 155 | Fibronectin type III domain | PF00041 | 0 | 31127 | 31213 | 1 | 84 | 84 | 36946 |
| TTN | 41 | 155 | Fibronectin type III domain | PF00041 | 0 | 31227 | 31313 | 1 | 84 | 84 | 36946 |
| TTN | 41 | 155 | Fibronectin type III domain | PF00041 | 0 | 31324 | 31411 | 1 | 84 | 84 | 36946 |
| TTN | 41 | 155 | Fibronectin type III domain | PF00041 | 0 | 31522 | 31608 | 1 | 84 | 84 | 36946 |
| TTN | 41 | 155 | Fibronectin type III domain | PF00041 | 0 | 31622 | 31709 | 1 | 84 | 84 | 36946 |
| TTN | 41 | 155 | Fibronectin type III domain | PF00041 | 0 | 31724 | 31810 | 1 | 84 | 84 | 36946 |
| TTN | 41 | 155 | Fibronectin type III domain | PF00041 | 0 | 31919 | 32004 | 1 | 84 | 84 | 36946 |
| TTN | 41 | 155 | Fibronectin type III domain | PF00041 | 0 | 32016 | 32100 | 1 | 84 | 84 | 36946 |
| TTN | 41 | 155 | Fibronectin type III domain | PF00041 | 0 | 32211 | 32299 | 1 | 84 | 84 | 36946 |
| TTN | 41 | 155 | Fibronectin type III domain | PF00041 | 0 | 32311 | 32397 | 1 | 84 | 84 | 36946 |
| TTN | 41 | 155 | Fibronectin type III domain | PF00041 | 0 | 32408 | 32499 | 1 | 84 | 84 | 36946 |
| TTN | 41 | 155 | Fibronectin type III domain | PF00041 | 0 | 32611 | 32698 | 1 | 84 | 84 | 36946 |
| TTN | 41 | 155 | Fibronectin type III domain | PF00041 | 0 | 32710 | 32797 | 1 | 84 | 84 | 36946 |
| TTN | 41 | 155 | Fibronectin type III domain | PF00041 | 0 | 32812 | 32899 | 1 | 84 | 84 | 36946 |
| TTN | 41 | 155 | Fibronectin type III domain | PF00041 | 0 | 33008 | 33093 | 1 | 84 | 84 | 36946 |
| TTN | 41 | 155 | Fibronectin type III domain | PF00041 | 0 | 33105 | 33191 | 1 | 84 | 84 | 36946 |
| TTN | 41 | 155 | Fibronectin type III domain | PF00041 | 0 | 33302 | 33388 | 1 | 84 | 84 | 36946 |
| TTN | 41 | 155 | Fibronectin type III domain | PF00041 | 0 | 33402 | 33488 | 1 | 84 | 84 | 36946 |
| TTN | 41 | 155 | Fibronectin type III domain | PF00041 | 0 | 33503 | 33589 | 1 | 84 | 84 | 36946 |
| TTN | 41 | 155 | Fibronectin type III domain | PF00041 | 0 | 33698 | 33781 | 1 | 84 | 84 | 36946 |
| TTN | 41 | 155 | Fibronectin type III domain | PF00041 | 0 | 33799 | 33886 | 1 | 84 | 84 | 36946 |
| TTN | 41 | 155 | Fibronectin type III domain | PF00041 | 0 | 33901 | 33987 | 1 | 84 | 84 | 36946 |
| TTN | 41 | 155 | Fibronectin type III domain | PF00041 | 0 | 34193 | 34280 | 1 | 84 | 84 | 36946 |
| TTN | 41 | 155 | Fibronectin type III domain | PF00041 | 0 | 34295 | 34381 | 1 | 84 | 84 | 36946 |
| TTN | 41 | 155 | Fibronectin type III domain | PF00041 | 0 | 34469 | 34486 | 70 | 84 | 84 | 36946 |
| TTN | 41 | 155 | Fibronectin type III domain | PF00041 | 0 | 34592 | 34676 | 1 | 84 | 84 | 36946 |
| TTN | 41 | 155 | Immunoglobulin domain | PF00047 | 0 | 58 | 117 | 1 | 47 | 50 | 36946 |
| TTN | 41 | 155 | Immunoglobulin domain | PF00047 | 0 | 156 | 213 | 1 | 47 | 50 | 36946 |
| TTN | 41 | 155 | Immunoglobulin domain | PF00047 | 0 | 998 | 1058 | 1 | 50 | 50 | 36946 |
| TTN | 41 | 155 | Immunoglobulin domain | PF00047 | 0 | 1136 | 1195 | 1 | 47 | 50 | 36946 |
| TTN | 41 | 155 | Immunoglobulin domain | PF00047 | 0 | 1345 | 1406 | 1 | 50 | 50 | 36946 |
| TTN | 41 | 155 | Immunoglobulin domain | PF00047 | 0 | 1515 | 1573 | 1 | 47 | 50 | 36946 |
| TTN | 41 | 155 | Immunoglobulin domain | PF00047 | 0 | 1614 | 1676 | 1 | 50 | 50 | 36946 |
| TTN | 41 | 155 | Immunoglobulin domain | PF00047 | 0 | 1774 | 1823 | 14 | 50 | 50 | 36946 |
| TTN | 41 | 155 | Immunoglobulin domain | PF00047 | 0 | 1899 | 1925 | 1 | 26 | 50 | 36946 |
| TTN | 41 | 155 | Immunoglobulin domain | PF00047 | 0 | 2136 | 2191 | 1 | 44 | 50 | 36946 |
| TTN | 41 | 155 | Immunoglobulin domain | PF00047 | 0 | 2233 | 2292 | 1 | 50 | 50 | 36946 |
| TTN | 41 | 155 | Immunoglobulin domain | PF00047 | 0 | 2325 | 2384 | 1 | 50 | 50 | 36946 |
| TTN | 41 | 155 | Immunoglobulin domain | PF00047 | 0 | 2432 | 2470 | 20 | 47 | 50 | 36946 |
| TTN | 41 | 155 | Immunoglobulin domain | PF00047 | 0 | 2503 | 2559 | 1 | 46 | 50 | 36946 |
| TTN | 41 | 155 | Immunoglobulin domain | PF00047 | 0 | 2591 | 2646 | 1 | 46 | 50 | 36946 |
| TTN | 41 | 155 | Immunoglobulin domain | PF00047 | 0 | 2678 | 2734 | 1 | 47 | 50 | 36946 |
| TTN | 41 | 155 | Immunoglobulin domain | PF00047 | 0 | 2853 | 2912 | 1 | 50 | 50 | 36946 |
| TTN | 41 | 155 | Immunoglobulin domain | PF00047 | 0 | 2940 | 2996 | 1 | 47 | 50 | 36946 |
| TTN | 41 | 155 | Immunoglobulin domain | PF00047 | 0 | 3025 | 3083 | 1 | 47 | 50 | 36946 |
| TTN | 41 | 155 | Immunoglobulin domain | PF00047 | 0 | 3116 | 3172 | 1 | 47 | 50 | 36946 |
| TTN | 41 | 155 | Immunoglobulin domain | PF00047 | 0 | 3222 | 3263 | 19 | 47 | 50 | 36946 |
| TTN | 41 | 155 | Immunoglobulin domain | PF00047 | 0 | 3303 | 3357 | 8 | 50 | 50 | 36946 |
| TTN | 41 | 155 | Immunoglobulin domain | PF00047 | 0 | 3403 | 3458 | 1 | 46 | 50 | 36946 |
| TTN | 41 | 155 | Immunoglobulin domain | PF00047 | 0 | 3523 | 3585 | 1 | 50 | 50 | 36946 |
| TTN | 41 | 155 | Immunoglobulin domain | PF00047 | 0 | 3686 | 3747 | 1 | 47 | 50 | 36946 |
| TTN | 41 | 155 | Immunoglobulin domain | PF00047 | 0 | 4126 | 4186 | 1 | 50 | 50 | 36946 |
| TTN | 41 | 155 | Immunoglobulin domain | PF00047 | 0 | 4338 | 4398 | 1 | 50 | 50 | 36946 |
| TTN | 41 | 155 | Immunoglobulin domain | PF00047 | 0 | 5318 | 5370 | 9 | 50 | 50 | 36946 |
| TTN | 41 | 155 | Immunoglobulin domain | PF00047 | 0 | 5507 | 5568 | 1 | 50 | 50 | 36946 |
| TTN | 41 | 155 | Immunoglobulin domain | PF00047 | 0 | 5641 | 5692 | 1 | 40 | 50 | 36946 |
| TTN | 41 | 155 | Immunoglobulin domain | PF00047 | 0 | 5755 | 5815 | 1 | 50 | 50 | 36946 |
| TTN | 41 | 155 | Immunoglobulin domain | PF00047 | 0 | 5881 | 5932 | 13 | 50 | 50 | 36946 |
| TTN | 41 | 155 | Immunoglobulin domain | PF00047 | 0 | 6497 | 6555 | 1 | 50 | 50 | 36946 |
| TTN | 41 | 155 | Immunoglobulin domain | PF00047 | 0 | 6590 | 6650 | 1 | 50 | 50 | 36946 |
| TTN | 41 | 155 | Immunoglobulin domain | PF00047 | 0 | 6685 | 6745 | 1 | 50 | 50 | 36946 |
| TTN | 41 | 155 | Immunoglobulin domain | PF00047 | 0 | 6778 | 6838 | 1 | 50 | 50 | 36946 |
| TTN | 41 | 155 | Immunoglobulin domain | PF00047 | 0 | 6872 | 6932 | 1 | 50 | 50 | 36946 |
| TTN | 41 | 155 | Immunoglobulin domain | PF00047 | 0 | 6965 | 7025 | 1 | 50 | 50 | 36946 |
| TTN | 41 | 155 | Immunoglobulin domain | PF00047 | 0 | 7058 | 7118 | 1 | 50 | 50 | 36946 |
| TTN | 41 | 155 | Immunoglobulin domain | PF00047 | 0 | 7151 | 7208 | 1 | 47 | 50 | 36946 |
| TTN | 41 | 155 | Immunoglobulin domain | PF00047 | 0 | 7247 | 7307 | 1 | 50 | 50 | 36946 |
| TTN | 41 | 155 | Immunoglobulin domain | PF00047 | 0 | 7351 | 7400 | 14 | 50 | 50 | 36946 |
| TTN | 41 | 155 | Immunoglobulin domain | PF00047 | 0 | 7434 | 7494 | 1 | 50 | 50 | 36946 |
| TTN | 41 | 155 | Immunoglobulin domain | PF00047 | 0 | 7527 | 7587 | 1 | 50 | 50 | 36946 |
| TTN | 41 | 155 | Immunoglobulin domain | PF00047 | 0 | 7620 | 7680 | 1 | 50 | 50 | 36946 |
| TTN | 41 | 155 | Immunoglobulin domain | PF00047 | 0 | 7713 | 7770 | 1 | 47 | 50 | 36946 |
| TTN | 41 | 155 | Immunoglobulin domain | PF00047 | 0 | 7809 | 7869 | 1 | 50 | 50 | 36946 |
| TTN | 41 | 155 | Immunoglobulin domain | PF00047 | 0 | 7902 | 7962 | 1 | 50 | 50 | 36946 |
| TTN | 41 | 155 | Immunoglobulin domain | PF00047 | 0 | 7996 | 8056 | 1 | 50 | 50 | 36946 |
| TTN | 41 | 155 | Immunoglobulin domain | PF00047 | 0 | 8089 | 8149 | 1 | 50 | 50 | 36946 |
| TTN | 41 | 155 | Immunoglobulin domain | PF00047 | 0 | 8182 | 8242 | 1 | 50 | 50 | 36946 |
| TTN | 41 | 155 | Immunoglobulin domain | PF00047 | 0 | 8275 | 8332 | 1 | 47 | 50 | 36946 |
| TTN | 41 | 155 | Immunoglobulin domain | PF00047 | 0 | 8371 | 8431 | 1 | 50 | 50 | 36946 |
| TTN | 41 | 155 | Immunoglobulin domain | PF00047 | 0 | 8464 | 8524 | 1 | 50 | 50 | 36946 |
| TTN | 41 | 155 | Immunoglobulin domain | PF00047 | 0 | 8558 | 8618 | 1 | 50 | 50 | 36946 |
| TTN | 41 | 155 | Immunoglobulin domain | PF00047 | 0 | 8651 | 8711 | 1 | 50 | 50 | 36946 |
| TTN | 41 | 155 | Immunoglobulin domain | PF00047 | 0 | 8744 | 8805 | 1 | 50 | 50 | 36946 |
| TTN | 41 | 155 | Immunoglobulin domain | PF00047 | 0 | 8838 | 8898 | 1 | 50 | 50 | 36946 |
| TTN | 41 | 155 | Immunoglobulin domain | PF00047 | 0 | 8934 | 8994 | 1 | 50 | 50 | 36946 |
| TTN | 41 | 155 | Immunoglobulin domain | PF00047 | 0 | 9027 | 9087 | 1 | 50 | 50 | 36946 |
| TTN | 41 | 155 | Immunoglobulin domain | PF00047 | 0 | 9120 | 9180 | 1 | 50 | 50 | 36946 |
| TTN | 41 | 155 | Immunoglobulin domain | PF00047 | 0 | 9213 | 9273 | 1 | 50 | 50 | 36946 |
| TTN | 41 | 155 | Immunoglobulin domain | PF00047 | 0 | 9309 | 9369 | 1 | 50 | 50 | 36946 |
| TTN | 41 | 155 | Immunoglobulin domain | PF00047 | 0 | 9405 | 9465 | 1 | 50 | 50 | 36946 |
| TTN | 41 | 155 | Immunoglobulin domain | PF00047 | 0 | 9499 | 9559 | 1 | 50 | 50 | 36946 |
| TTN | 41 | 155 | Immunoglobulin domain | PF00047 | 0 | 9592 | 9652 | 1 | 50 | 50 | 36946 |
| TTN | 41 | 155 | Immunoglobulin domain | PF00047 | 0 | 9685 | 9746 | 1 | 50 | 50 | 36946 |
| TTN | 41 | 155 | Immunoglobulin domain | PF00047 | 0 | 9779 | 9836 | 1 | 47 | 50 | 36946 |
| TTN | 41 | 155 | Immunoglobulin domain | PF00047 | 0 | 9875 | 9935 | 1 | 50 | 50 | 36946 |
| TTN | 41 | 155 | Immunoglobulin domain | PF00047 | 0 | 9968 | 10028 | 1 | 50 | 50 | 36946 |
| TTN | 41 | 155 | Immunoglobulin domain | PF00047 | 0 | 10061 | 10121 | 1 | 50 | 50 | 36946 |
| TTN | 41 | 155 | Immunoglobulin domain | PF00047 | 0 | 10154 | 10214 | 1 | 50 | 50 | 36946 |
| TTN | 41 | 155 | Immunoglobulin domain | PF00047 | 0 | 10250 | 10310 | 1 | 50 | 50 | 36946 |
| TTN | 41 | 155 | Immunoglobulin domain | PF00047 | 0 | 10344 | 10365 | 29 | 50 | 50 | 36946 |
| TTN | 41 | 155 | Immunoglobulin domain | PF00047 | 0 | 10403 | 10456 | 8 | 50 | 50 | 36946 |
| TTN | 41 | 155 | Immunoglobulin domain | PF00047 | 0 | 10489 | 10549 | 1 | 50 | 50 | 36946 |
| TTN | 41 | 155 | Immunoglobulin domain | PF00047 | 0 | 10582 | 10643 | 1 | 50 | 50 | 36946 |
| TTN | 41 | 155 | Immunoglobulin domain | PF00047 | 0 | 10676 | 10733 | 1 | 47 | 50 | 36946 |
| TTN | 41 | 155 | Immunoglobulin domain | PF00047 | 0 | 10772 | 10832 | 1 | 50 | 50 | 36946 |
| TTN | 41 | 155 | Immunoglobulin domain | PF00047 | 0 | 10865 | 10925 | 1 | 50 | 50 | 36946 |
| TTN | 41 | 155 | Immunoglobulin domain | PF00047 | 0 | 10958 | 11018 | 1 | 50 | 50 | 36946 |
| TTN | 41 | 155 | Immunoglobulin domain | PF00047 | 0 | 11051 | 11111 | 1 | 50 | 50 | 36946 |
| TTN | 41 | 155 | Immunoglobulin domain | PF00047 | 0 | 11147 | 11207 | 1 | 50 | 50 | 36946 |
| TTN | 41 | 155 | Immunoglobulin domain | PF00047 | 0 | 11243 | 11303 | 1 | 50 | 50 | 36946 |
| TTN | 41 | 155 | Immunoglobulin domain | PF00047 | 0 | 11340 | 11400 | 1 | 50 | 50 | 36946 |
| TTN | 41 | 155 | Immunoglobulin domain | PF00047 | 0 | 11436 | 11496 | 1 | 50 | 50 | 36946 |
| TTN | 41 | 155 | Immunoglobulin domain | PF00047 | 0 | 11544 | 11605 | 1 | 50 | 50 | 36946 |
| TTN | 41 | 155 | Immunoglobulin domain | PF00047 | 0 | 11760 | 11804 | 16 | 47 | 50 | 36946 |
| TTN | 41 | 155 | Immunoglobulin domain | PF00047 | 0 | 11835 | 11894 | 1 | 50 | 50 | 36946 |
| TTN | 41 | 155 | Immunoglobulin domain | PF00047 | 0 | 11924 | 11980 | 1 | 47 | 50 | 36946 |
| TTN | 41 | 155 | Immunoglobulin domain | PF00047 | 0 | 14626 | 14685 | 1 | 50 | 50 | 36946 |
| TTN | 41 | 155 | Immunoglobulin domain | PF00047 | 0 | 14720 | 14776 | 1 | 47 | 50 | 36946 |
| TTN | 41 | 155 | Immunoglobulin domain | PF00047 | 0 | 14813 | 14866 | 1 | 41 | 50 | 36946 |
| TTN | 41 | 155 | Immunoglobulin domain | PF00047 | 0 | 14993 | 15051 | 1 | 50 | 50 | 36946 |
| TTN | 41 | 155 | Immunoglobulin domain | PF00047 | 0 | 15081 | 15132 | 1 | 41 | 50 | 36946 |
| TTN | 41 | 155 | Immunoglobulin domain | PF00047 | 0 | 15170 | 15226 | 1 | 48 | 50 | 36946 |
| TTN | 41 | 155 | Immunoglobulin domain | PF00047 | 0 | 15347 | 15403 | 1 | 47 | 50 | 36946 |
| TTN | 41 | 155 | Immunoglobulin domain | PF00047 | 0 | 15436 | 15488 | 1 | 42 | 50 | 36946 |
| TTN | 41 | 155 | Immunoglobulin domain | PF00047 | 0 | 15525 | 15582 | 1 | 48 | 50 | 36946 |
| TTN | 41 | 155 | Immunoglobulin domain | PF00047 | 0 | 15703 | 15757 | 1 | 45 | 50 | 36946 |
| TTN | 41 | 155 | Immunoglobulin domain | PF00047 | 0 | 15792 | 15851 | 1 | 50 | 50 | 36946 |
| TTN | 41 | 155 | Immunoglobulin domain | PF00047 | 0 | 15881 | 15940 | 1 | 50 | 50 | 36946 |
| TTN | 41 | 155 | Immunoglobulin domain | PF00047 | 0 | 15970 | 16029 | 1 | 50 | 50 | 36946 |
| TTN | 41 | 155 | Immunoglobulin domain | PF00047 | 0 | 16059 | 16118 | 1 | 50 | 50 | 36946 |
| TTN | 41 | 155 | Immunoglobulin domain | PF00047 | 0 | 16147 | 16168 | 1 | 23 | 50 | 36946 |
| TTN | 41 | 155 | Immunoglobulin domain | PF00047 | 0 | 16241 | 16296 | 1 | 46 | 50 | 36946 |
| TTN | 41 | 155 | Immunoglobulin domain | PF00047 | 0 | 16331 | 16389 | 2 | 50 | 50 | 36946 |
| TTN | 41 | 155 | Immunoglobulin domain | PF00047 | 0 | 16419 | 16475 | 1 | 47 | 50 | 36946 |
| TTN | 41 | 155 | Immunoglobulin domain | PF00047 | 0 | 16507 | 16560 | 1 | 46 | 50 | 36946 |
| TTN | 41 | 155 | Immunoglobulin domain | PF00047 | 0 | 16911 | 16959 | 12 | 47 | 50 | 36946 |
| TTN | 41 | 155 | Immunoglobulin domain | PF00047 | 0 | 17198 | 17254 | 1 | 46 | 50 | 36946 |
| TTN | 41 | 155 | Immunoglobulin domain | PF00047 | 0 | 17894 | 17951 | 1 | 47 | 50 | 36946 |
| TTN | 41 | 155 | Immunoglobulin domain | PF00047 | 0 | 18187 | 18273 | 1 | 47 | 50 | 36946 |
| TTN | 41 | 155 | Immunoglobulin domain | PF00047 | 0 | 18619 | 18674 | 1 | 46 | 50 | 36946 |
| TTN | 41 | 155 | Immunoglobulin domain | PF00047 | 0 | 18913 | 18976 | 1 | 47 | 50 | 36946 |
| TTN | 41 | 155 | Immunoglobulin domain | PF00047 | 0 | 19325 | 19390 | 1 | 47 | 50 | 36946 |
| TTN | 41 | 155 | Immunoglobulin domain | PF00047 | 0 | 19631 | 19695 | 1 | 47 | 50 | 36946 |
| TTN | 41 | 155 | Immunoglobulin domain | PF00047 | 0 | 20039 | 20094 | 1 | 47 | 50 | 36946 |
| TTN | 41 | 155 | Immunoglobulin domain | PF00047 | 0 | 20333 | 20392 | 1 | 50 | 50 | 36946 |
| TTN | 41 | 155 | Immunoglobulin domain | PF00047 | 0 | 20733 | 20788 | 1 | 47 | 50 | 36946 |
| TTN | 41 | 155 | Immunoglobulin domain | PF00047 | 0 | 21025 | 21081 | 1 | 46 | 50 | 36946 |
| TTN | 41 | 155 | Immunoglobulin domain | PF00047 | 0 | 21423 | 21479 | 1 | 46 | 50 | 36946 |
| TTN | 41 | 155 | Immunoglobulin domain | PF00047 | 0 | 21716 | 21774 | 1 | 46 | 50 | 36946 |
| TTN | 41 | 155 | Immunoglobulin domain | PF00047 | 0 | 22121 | 22177 | 1 | 47 | 50 | 36946 |
| TTN | 41 | 155 | Immunoglobulin domain | PF00047 | 0 | 22413 | 22470 | 1 | 47 | 50 | 36946 |
| TTN | 41 | 155 | Immunoglobulin domain | PF00047 | 0 | 22820 | 22867 | 13 | 47 | 50 | 36946 |
| TTN | 41 | 155 | Immunoglobulin domain | PF00047 | 0 | 23508 | 23554 | 14 | 47 | 50 | 36946 |
| TTN | 41 | 155 | Immunoglobulin domain | PF00047 | 0 | 23893 | 23951 | 1 | 47 | 50 | 36946 |
| TTN | 41 | 155 | Immunoglobulin domain | PF00047 | 0 | 24593 | 24636 | 16 | 46 | 50 | 36946 |
| TTN | 41 | 155 | Immunoglobulin domain | PF00047 | 0 | 24976 | 25032 | 1 | 46 | 50 | 36946 |
| TTN | 41 | 155 | Immunoglobulin domain | PF00047 | 0 | 25388 | 25429 | 16 | 46 | 50 | 36946 |
| TTN | 41 | 155 | Immunoglobulin domain | PF00047 | 0 | 25632 | 25689 | 1 | 47 | 50 | 36946 |
| TTN | 41 | 155 | Immunoglobulin domain | PF00047 | 0 | 26028 | 26084 | 1 | 46 | 50 | 36946 |
| TTN | 41 | 155 | Immunoglobulin domain | PF00047 | 0 | 26427 | 26482 | 1 | 47 | 50 | 36946 |
| TTN | 41 | 155 | Immunoglobulin domain | PF00047 | 0 | 26714 | 26770 | 1 | 46 | 50 | 36946 |
| TTN | 41 | 155 | Immunoglobulin domain | PF00047 | 0 | 27110 | 27137 | 1 | 27 | 50 | 36946 |
| TTN | 41 | 155 | Immunoglobulin domain | PF00047 | 0 | 27509 | 27563 | 1 | 46 | 50 | 36946 |
| TTN | 41 | 155 | Immunoglobulin domain | PF00047 | 0 | 27796 | 27853 | 1 | 47 | 50 | 36946 |
| TTN | 41 | 155 | Immunoglobulin domain | PF00047 | 0 | 28192 | 28250 | 1 | 47 | 50 | 36946 |
| TTN | 41 | 155 | Immunoglobulin domain | PF00047 | 0 | 28605 | 28646 | 16 | 46 | 50 | 36946 |
| TTN | 41 | 155 | Immunoglobulin domain | PF00047 | 0 | 28892 | 28935 | 16 | 46 | 50 | 36946 |
| TTN | 41 | 155 | Immunoglobulin domain | PF00047 | 0 | 29274 | 29349 | 1 | 50 | 50 | 36946 |
| TTN | 41 | 155 | Immunoglobulin domain | PF00047 | 0 | 29671 | 29726 | 1 | 47 | 50 | 36946 |
| TTN | 41 | 155 | Immunoglobulin domain | PF00047 | 0 | 30357 | 30413 | 1 | 46 | 50 | 36946 |
| TTN | 41 | 155 | Immunoglobulin domain | PF00047 | 0 | 30756 | 30812 | 1 | 46 | 50 | 36946 |
| TTN | 41 | 155 | Immunoglobulin domain | PF00047 | 0 | 31048 | 31105 | 1 | 47 | 50 | 36946 |
| TTN | 41 | 155 | Immunoglobulin domain | PF00047 | 0 | 31443 | 31500 | 1 | 47 | 50 | 36946 |
| TTN | 41 | 155 | Immunoglobulin domain | PF00047 | 0 | 31855 | 31897 | 16 | 47 | 50 | 36946 |
| TTN | 41 | 155 | Immunoglobulin domain | PF00047 | 0 | 32132 | 32189 | 1 | 47 | 50 | 36946 |
| TTN | 41 | 155 | Immunoglobulin domain | PF00047 | 0 | 32532 | 32589 | 1 | 47 | 50 | 36946 |
| TTN | 41 | 155 | Immunoglobulin domain | PF00047 | 0 | 32931 | 32986 | 1 | 47 | 50 | 36946 |
| TTN | 41 | 155 | Immunoglobulin domain | PF00047 | 0 | 33621 | 33675 | 1 | 46 | 50 | 36946 |
| TTN | 41 | 155 | Immunoglobulin domain | PF00047 | 0 | 34017 | 34077 | 1 | 50 | 50 | 36946 |
| TTN | 41 | 155 | Immunoglobulin domain | PF00047 | 0 | 34113 | 34170 | 1 | 46 | 50 | 36946 |
| TTN | 41 | 155 | Immunoglobulin domain | PF00047 | 0 | 34412 | 34470 | 1 | 46 | 50 | 36946 |
| TTN | 41 | 155 | Immunoglobulin domain | PF00047 | 0 | 34512 | 34569 | 1 | 46 | 50 | 36946 |
| TTN | 41 | 155 | Immunoglobulin domain | PF00047 | 0 | 35052 | 35113 | 1 | 50 | 50 | 36946 |
| TTN | 41 | 155 | Immunoglobulin domain | PF00047 | 0 | 35173 | 35233 | 1 | 47 | 50 | 36946 |
| TTN | 41 | 155 | Immunoglobulin domain | PF00047 | 0 | 35278 | 35336 | 1 | 47 | 50 | 36946 |
| TTN | 41 | 155 | Immunoglobulin domain | PF00047 | 0 | 35871 | 35918 | 16 | 50 | 50 | 36946 |
| TTN | 41 | 155 | Immunoglobulin domain | PF00047 | 0 | 36045 | 36105 | 1 | 50 | 50 | 36946 |
| TTN | 41 | 155 | Immunoglobulin domain | PF00047 | 0 | 36203 | 36263 | 4 | 50 | 50 | 36946 |
| TTN | 41 | 155 | Immunoglobulin domain | PF00047 | 0 | 36388 | 36448 | 1 | 50 | 50 | 36946 |
| TTN | 41 | 155 | Immunoglobulin domain | PF00047 | 0 | 36575 | 36633 | 1 | 50 | 50 | 36946 |
| TTN | 41 | 155 | Immunoglobulin domain | PF00047 | 0 | 36670 | 36727 | 1 | 47 | 50 | 36946 |
| TTN | 41 | 155 | Immunoglobulin domain | PF00047 | 0 | 36865 | 36925 | 1 | 47 | 50 | 36946 |
| TTN | 41 | 155 | Protein kinase domain | PF00069 | 1.90E−52 | 34721 | 34975 | 1 | 294 | 294 | 36946 |
| TTN | 41 | 155 | PPAK motif | PF02818 | 0 | 784 | 805 | 4 | 28 | 28 | 36946 |
| TTN | 41 | 155 | PPAK motif | PF02818 | 0 | 11508 | 11526 | 10 | 28 | 28 | 36946 |
| TTN | 41 | 155 | PPAK motif | PF02818 | 0 | 12053 | 12080 | 1 | 28 | 28 | 36946 |
| TTN | 41 | 155 | PPAK motif | PF02818 | 0 | 12081 | 12092 | 1 | 12 | 28 | 36946 |
| TTN | 41 | 155 | PPAK motif | PF02818 | 0 | 12136 | 12154 | 8 | 28 | 28 | 36946 |
| TTN | 41 | 155 | PPAK motif | PF02818 | 0 | 12233 | 12252 | 7 | 27 | 28 | 36946 |
| TTN | 41 | 155 | PPAK motif | PF02818 | 0 | 12253 | 12276 | 1 | 28 | 28 | 36946 |
| TTN | 41 | 155 | PPAK motif | PF02818 | 0 | 12282 | 12306 | 4 | 28 | 28 | 36946 |
| TTN | 41 | 155 | PPAK motif | PF02818 | 0 | 12338 | 12358 | 5 | 25 | 28 | 36946 |
| TTN | 41 | 155 | PPAK motif | PF02818 | 0 | 12361 | 12388 | 1 | 28 | 28 | 36946 |
| TTN | 41 | 155 | PPAK motif | PF02818 | 0 | 12389 | 12416 | 1 | 28 | 28 | 36946 |
| TTN | 41 | 155 | PPAK motif | PF02818 | 0 | 12418 | 12445 | 1 | 28 | 28 | 36946 |
| TTN | 41 | 155 | PPAK motif | PF02818 | 0 | 12446 | 12472 | 1 | 28 | 28 | 36946 |
| TTN | 41 | 155 | PPAK motif | PF02818 | 0 | 12473 | 12496 | 1 | 28 | 28 | 36946 |
| TTN | 41 | 155 | PPAK motif | PF02818 | 0 | 12497 | 12523 | 1 | 28 | 28 | 36946 |
| TTN | 41 | 155 | PPAK motif | PF02818 | 0 | 12542 | 12557 | 13 | 28 | 28 | 36946 |
| TTN | 41 | 155 | PPAK motif | PF02818 | 0 | 12568 | 12591 | 4 | 28 | 28 | 36946 |
| TTN | 41 | 155 | PPAK motif | PF02818 | 0 | 12593 | 12617 | 2 | 26 | 28 | 36946 |
| TTN | 41 | 155 | PPAK motif | PF02818 | 0 | 12618 | 12645 | 1 | 28 | 28 | 36946 |
| TTN | 41 | 155 | PPAK motif | PF02818 | 0 | 12646 | 12673 | 1 | 28 | 28 | 36946 |
| TTN | 41 | 155 | PPAK motif | PF02818 | 0 | 12674 | 12701 | 1 | 28 | 28 | 36946 |
| TTN | 41 | 155 | PPAK motif | PF02818 | 0 | 12702 | 12724 | 1 | 28 | 28 | 36946 |
| TTN | 41 | 155 | PPAK motif | PF02818 | 0 | 12776 | 12796 | 8 | 28 | 28 | 36946 |
| TTN | 41 | 155 | PPAK motif | PF02818 | 0 | 12797 | 12821 | 1 | 28 | 28 | 36946 |
| TTN | 41 | 155 | PPAK motif | PF02818 | 0 | 12823 | 12848 | 2 | 28 | 28 | 36946 |
| TTN | 41 | 155 | PPAK motif | PF02818 | 0 | 12853 | 12878 | 1 | 28 | 28 | 36946 |
| TTN | 41 | 155 | PPAK motif | PF02818 | 0 | 12879 | 12887 | 20 | 28 | 28 | 36946 |
| TTN | 41 | 155 | PPAK motif | PF02818 | 0 | 12947 | 12974 | 1 | 28 | 28 | 36946 |
| TTN | 41 | 155 | PPAK motif | PF02818 | 0 | 12975 | 13000 | 1 | 28 | 28 | 36946 |
| TTN | 41 | 155 | PPAK motif | PF02818 | 0 | 13001 | 13028 | 1 | 28 | 28 | 36946 |
| TTN | 41 | 155 | PPAK motif | PF02818 | 0 | 13029 | 13056 | 1 | 28 | 28 | 36946 |
| TTN | 41 | 155 | PPAK motif | PF02818 | 0 | 13057 | 13080 | 1 | 28 | 28 | 36946 |
| TTN | 41 | 155 | PPAK motif | PF02818 | 0 | 13082 | 13100 | 7 | 28 | 28 | 36946 |
| TTN | 41 | 155 | PPAK motif | PF02818 | 0 | 13106 | 13131 | 1 | 28 | 28 | 36946 |
| TTN | 41 | 155 | PPAK motif | PF02818 | 0 | 13153 | 13178 | 1 | 28 | 28 | 36946 |
| TTN | 41 | 155 | PPAK motif | PF02818 | 0 | 13180 | 13184 | 1 | 5 | 28 | 36946 |
| TTN | 41 | 155 | PPAK motif | PF02818 | 0 | 13216 | 13240 | 4 | 28 | 28 | 36946 |
| TTN | 41 | 155 | PPAK motif | PF02818 | 0 | 13241 | 13265 | 1 | 28 | 28 | 36946 |
| TTN | 41 | 155 | PPAK motif | PF02818 | 0 | 13266 | 13291 | 1 | 28 | 28 | 36946 |
| TTN | 41 | 155 | PPAK motif | PF02818 | 0 | 13292 | 13313 | 1 | 26 | 28 | 36946 |
| TTN | 41 | 155 | PPAK motif | PF02818 | 0 | 13315 | 13331 | 1 | 18 | 28 | 36946 |
| TTN | 41 | 155 | PPAK motif | PF02818 | 0 | 13332 | 13345 | 13 | 28 | 28 | 36946 |
| TTN | 41 | 155 | PPAK motif | PF02818 | 0 | 13346 | 13368 | 1 | 28 | 28 | 36946 |
| TTN | 41 | 155 | PPAK motif | PF02818 | 0 | 13446 | 13473 | 1 | 28 | 28 | 36946 |
| TTN | 41 | 155 | PPAK motif | PF02818 | 0 | 13538 | 13560 | 6 | 28 | 28 | 36946 |
| TTN | 41 | 155 | PPAK motif | PF02818 | 0 | 13561 | 13588 | 1 | 28 | 28 | 36946 |
| TTN | 41 | 155 | PPAK motif | PF02818 | 0 | 13614 | 13639 | 1 | 28 | 28 | 36946 |
| TTN | 41 | 155 | PPAK motif | PF02818 | 0 | 13641 | 13667 | 2 | 28 | 28 | 36946 |
| TTN | 41 | 155 | PPAK motif | PF02818 | 0 | 13668 | 13695 | 1 | 28 | 28 | 36946 |
| TTN | 41 | 155 | PPAK motif | PF02818 | 0 | 13696 | 13723 | 1 | 28 | 28 | 36946 |
| TTN | 41 | 155 | PPAK motif | PF02818 | 0 | 13724 | 13751 | 1 | 28 | 28 | 36946 |
| TTN | 41 | 155 | PPAK motif | PF02818 | 0 | 13752 | 13780 | 1 | 28 | 28 | 36946 |
| TTN | 41 | 155 | PPAK motif | PF02818 | 0 | 13781 | 13807 | 1 | 28 | 28 | 36946 |
| TTN | 41 | 155 | PPAK motif | PF02818 | 0 | 13812 | 13834 | 5 | 28 | 28 | 36946 |
| TTN | 41 | 155 | PPAK motif | PF02818 | 0 | 13839 | 13862 | 5 | 28 | 28 | 36946 |
| TTN | 41 | 155 | PPAK motif | PF02818 | 0 | 13863 | 13890 | 1 | 28 | 28 | 36946 |
| TTN | 41 | 155 | PPAK motif | PF02818 | 0 | 13891 | 13918 | 1 | 28 | 28 | 36946 |
| TTN | 41 | 155 | PPAK motif | PF02818 | 0 | 13919 | 13946 | 1 | 28 | 28 | 36946 |
| TTN | 41 | 155 | PPAK motif | PF02818 | 0 | 13947 | 13974 | 1 | 28 | 28 | 36946 |
| TTN | 41 | 155 | PPAK motif | PF02818 | 0 | 13975 | 14002 | 1 | 28 | 28 | 36946 |
| TTN | 41 | 155 | PPAK motif | PF02818 | 0 | 14003 | 14030 | 1 | 28 | 28 | 36946 |
| TTN | 41 | 155 | PPAK motif | PF02818 | 0 | 14031 | 14059 | 1 | 28 | 28 | 36946 |
| TTN | 41 | 155 | PPAK motif | PF02818 | 0 | 14060 | 14087 | 1 | 28 | 28 | 36946 |
| TTN | 41 | 155 | PPAK motif | PF02818 | 0 | 14088 | 14112 | 1 | 28 | 28 | 36946 |
| TTN | 41 | 155 | PPAK motif | PF02818 | 0 | 14113 | 14138 | 1 | 28 | 28 | 36946 |
| TTN | 41 | 155 | PPAK motif | PF02818 | 0 | 14139 | 14166 | 1 | 28 | 28 | 36946 |
| TTN | 41 | 155 | PPAK motif | PF02818 | 0 | 14171 | 14196 | 1 | 28 | 28 | 36946 |
| TTN | 41 | 155 | PPAK motif | PF02818 | 0 | 14197 | 14201 | 1 | 5 | 28 | 36946 |
| TTN | 41 | 155 | PPAK motif | PF02818 | 0 | 14224 | 14246 | 4 | 28 | 28 | 36946 |
| TTN | 41 | 155 | PPAK motif | PF02818 | 0 | 14247 | 14274 | 1 | 28 | 28 | 36946 |
| TTN | 41 | 155 | PPAK motif | PF02818 | 0 | 14276 | 14302 | 2 | 28 | 28 | 36946 |
| TTN | 41 | 155 | PPAK motif | PF02818 | 0 | 14303 | 14328 | 1 | 26 | 28 | 36946 |
| TTN | 41 | 155 | PPAK motif | PF02818 | 0 | 14330 | 14354 | 1 | 25 | 28 | 36946 |
| TTN | 41 | 155 | PPAK motif | PF02818 | 0 | 14356 | 14381 | 2 | 28 | 28 | 36946 |
| TTN | 41 | 155 | PPAK motif | PF02818 | 0 | 14399 | 14426 | 1 | 28 | 28 | 36946 |
| TTN | 41 | 155 | PPAK motif | PF02818 | 0 | 14432 | 14457 | 1 | 28 | 28 | 36946 |
| TTN | 41 | 155 | PPAK motif | PF02818 | 0 | 14461 | 14482 | 3 | 28 | 28 | 36946 |
| TTN | 41 | 155 | PPAK motif | PF02818 | 0 | 14484 | 14509 | 1 | 28 | 28 | 36946 |
| TTN | 41 | 155 | PPAK motif | PF02818 | 0 | 14513 | 14535 | 6 | 28 | 28 | 36946 |
| TTN | 41 | 155 | PPAK motif | PF02818 | 0 | 14540 | 14567 | 1 | 28 | 28 | 36946 |
| TTN | 41 | 155 | PPAK motif | PF02818 | 0 | 17076 | 17087 | 1 | 12 | 28 | 36946 |
| TTN | 41 | 155 | PPAK motif | PF02818 | 0 | 18214 | 18236 | 5 | 28 | 28 | 36946 |
| TTN | 41 | 155 | PPAK motif | PF02818 | 0 | 19653 | 19665 | 1 | 14 | 28 | 36946 |
| skMLCK | 42 | 156 | Protein kinase domain | PF00069 | 7.90E−78 | 302 | 557 | 1 | 294 | 294 | 613 |
| SgK085 | 43 | 157 | Protein kinase domain | PF00069 | 1.20E−81 | 105 | 360 | 1 | 294 | 294 | 390 |
| PIM2 | 44 | 158 | Protein kinase domain | PF00069 | 4.70E−70 | 132 | 386 | 1 | 294 | 294 | 411 |
| Trio | 45 | 159 | SH3 domain | PF00018 | 7.00E−08 | 1659 | 1699 | 1 | 39 | 58 | 3103 |
| Trio | 45 | 159 | SH3 domain | PF00018 | 7.00E−08 | 2566 | 2586 | 9 | 29 | 58 | 3103 |
| Trio | 45 | 159 | Immunoglobulin domain | PF00047 | 1.70E−08 | 2703 | 2765 | 1 | 50 | 50 | 3103 |
| Trio | 45 | 159 | Protein kinase domain | PF00069 | 1.50E−66 | 2800 | 3054 | 1 | 294 | 294 | 3103 |
| Trio | 45 | 159 | PH domain | PF00169 | 1.80E−25 | 1480 | 1591 | 1 | 85 | 85 | 3103 |
| Trio | 45 | 159 | PH domain | PF00169 | 1.80E−25 | 2158 | 2271 | 1 | 85 | 85 | 3103 |
| Trio | 45 | 159 | Spectrin repeat | PF00435 | 2.90E−21 | 218 | 265 | 1 | 48 | 108 | 3103 |
| Trio | 45 | 159 | Spectrin repeat | PF00435 | 2.90E−21 | 309 | 338 | 79 | 108 | 108 | 3103 |
| Trio | 45 | 159 | Spectrin repeat | PF00435 | 2.90E−21 | 340 | 446 | 1 | 108 | 108 | 3103 |
| Trio | 45 | 159 | Spectrin repeat | PF00435 | 2.90E−21 | 597 | 672 | 30 | 108 | 108 | 3103 |
| Trio | 45 | 159 | Spectrin repeat | PF00435 | 2.90E−21 | 676 | 784 | 6 | 108 | 108 | 3103 |
| Trio | 45 | 159 | Spectrin repeat | PF00435 | 2.90E−21 | 907 | 1012 | 1 | 108 | 108 | 3103 |
| Trio | 45 | 159 | Spectrin repeat | PF00435 | 2.90E−21 | 1138 | 1244 | 1 | 108 | 108 | 3103 |
| Trio | 45 | 159 | RhoGEF domain | PF00621 | 3.50E−73 | 1296 | 1466 | 1 | 207 | 207 | 3103 |
| Trio | 45 | 159 | RhoGEF domain | PF00621 | 3.50E−73 | 1973 | 2144 | 1 | 207 | 207 | 3103 |
| Trad | 46 | 160 | SH3 domain | PF00018 | 0.000002 | 1625 | 1680 | 1 | 53 | 58 | 2966 |
| Trad | 46 | 160 | SH3 domain | PF00018 | 0.000002 | 2346 | 2357 | 47 | 58 | 58 | 2966 |
| Trad | 46 | 160 | Fibronectin type III domain | PF00041 | 1.70E−08 | 2543 | 2583 | 1 | 40 | 84 | 2966 |
| Trad | 46 | 160 | Fibronectin type III domain | PF00041 | 1.70E−08 | 2599 | 2628 | 56 | 84 | 84 | 2966 |
| Trad | 46 | 160 | Immunoglobulin domain | PF00047 | 1.40E−09 | 2459 | 2524 | 1 | 50 | 50 | 2966 |
| Trad | 46 | 160 | Protein kinase domain | PF00069 | 1.00E−65 | 2658 | 2912 | 1 | 294 | 294 | 2966 |
| Trad | 46 | 160 | PH domain | PF00169 | 1.80E−20 | 1445 | 1556 | 1 | 85 | 85 | 2966 |
| Trad | 46 | 160 | PH domain | PF00169 | 1.80E−20 | 2091 | 2200 | 1 | 85 | 85 | 2966 |
| Trad | 46 | 160 | Spectrin repeat | PF00435 | 3.40E−12 | 166 | 213 | 1 | 48 | 108 | 2966 |
| Trad | 46 | 160 | Spectrin repeat | PF00435 | 3.40E−12 | 257 | 286 | 79 | 108 | 108 | 2966 |
| Trad | 46 | 160 | Spectrin repeat | PF00435 | 3.40E−12 | 288 | 394 | 1 | 108 | 108 | 2966 |
| Trad | 46 | 160 | Spectrin repeat | PF00435 | 3.40E−12 | 514 | 620 | 1 | 108 | 108 | 2966 |
| Trad | 46 | 160 | Spectrin repeat | PF00435 | 3.40E−12 | 624 | 666 | 6 | 48 | 108 | 2966 |
| Trad | 46 | 160 | Spectrin repeat | PF00435 | 3.40E−12 | 781 | 855 | 32 | 108 | 108 | 2966 |
| Trad | 46 | 160 | Spectrin repeat | PF00435 | 3.40E−12 | 868 | 915 | 1 | 47 | 108 | 2966 |
| Trad | 46 | 160 | Spectrin repeat | PF00435 | 3.40E−12 | 936 | 982 | 60 | 108 | 108 | 2966 |
| Trad | 46 | 160 | Spectrin repeat | PF00435 | 3.40E−12 | 1107 | 1199 | 1 | 94 | 108 | 2966 |
| Trad | 46 | 160 | RhoGEF domain | PF00621 | 9.20E−76 | 1262 | 1431 | 1 | 207 | 207 | 2966 |
| Trad | 46 | 160 | RhoGEF domain | PF00621 | 9.20E−76 | 1907 | 2077 | 1 | 207 | 207 | 2966 |
| SPEG | 47 | 161 | Fibronectin type III domain | PF00041 | 1.20E−07 | 1287 | 1376 | 1 | 84 | 84 | 3262 |
| SPEG | 47 | 161 | Fibronectin type III domain | PF00041 | 1.20E−07 | 2681 | 2763 | 1 | 84 | 84 | 3262 |
| SPEG | 47 | 161 | Immunoglobulin domain | PF00047 | 3.90E−51 | 59 | 112 | 1 | 50 | 50 | 3262 |
| SPEG | 47 | 161 | Immunoglobulin domain | PF00047 | 3.90E−51 | 741 | 801 | 1 | 50 | 50 | 3262 |
| SPEG | 47 | 161 | Immunoglobulin domain | PF00047 | 3.90E−51 | 888 | 949 | 1 | 50 | 50 | 3262 |
| SPEG | 47 | 161 | Immunoglobulin domain | PF00047 | 3.90E−51 | 987 | 1048 | 1 | 50 | 50 | 3262 |
| SPEG | 47 | 161 | Immunoglobulin domain | PF00047 | 3.90E−51 | 1083 | 1139 | 1 | 46 | 50 | 3262 |
| SPEG | 47 | 161 | Immunoglobulin domain | PF00047 | 3.90E−51 | 1207 | 1263 | 1 | 46 | 50 | 3262 |
| SPEG | 47 | 161 | Immunoglobulin domain | PF00047 | 3.90E−51 | 1413 | 1471 | 8 | 50 | 50 | 3262 |
| SPEG | 47 | 161 | Immunoglobulin domain | PF00047 | 3.90E−51 | 1504 | 1564 | 1 | 50 | 50 | 3262 |
| SPEG | 47 | 161 | Immunoglobulin domain | PF00047 | 3.90E−51 | 2601 | 2662 | 1 | 50 | 50 | 3262 |
| SPEG | 47 | 161 | Protein kinase domain | PF00069 | 6.80E−117 | 1606 | 1859 | 1 | 294 | 294 | 3262 |
| SPEG | 47 | 161 | Protein kinase domain | PF00069 | 6.80E−117 | 2961 | 3213 | 1 | 294 | 294 | 3262 |
| Obscurin | 48 | 162 | Fibronectin type III domain | PF00041 | 1.50E−27 | 509 | 597 | 1 | 84 | 84 | 8523 |
| Obscurin | 48 | 162 | Fibronectin type III domain | PF00041 | 1.50E−27 | 5102 | 5187 | 1 | 84 | 84 | 8523 |
| Obscurin | 48 | 162 | Immunoglobulin domain | PF00047 | 0 | 19 | 79 | 1 | 50 | 50 | 8523 |
| Obscurin | 48 | 162 | Immunoglobulin domain | PF00047 | 0 | 119 | 177 | 1 | 46 | 50 | 8523 |
| Obscurin | 48 | 162 | Immunoglobulin domain | PF00047 | 0 | 246 | 307 | 1 | 50 | 50 | 8523 |
| Obscurin | 48 | 162 | Immunoglobulin domain | PF00047 | 0 | 341 | 400 | 1 | 50 | 50 | 8523 |
| Obscurin | 48 | 162 | Immunoglobulin domain | PF00047 | 0 | 717 | 776 | 1 | 50 | 50 | 8523 |
| Obscurin | 48 | 162 | Immunoglobulin domain | PF00047 | 0 | 809 | 868 | 1 | 50 | 50 | 8523 |
| Obscurin | 48 | 162 | Immunoglobulin domain | PF00047 | 0 | 901 | 960 | 1 | 50 | 50 | 8523 |
| Obscurin | 48 | 162 | Immunoglobulin domain | PF00047 | 0 | 993 | 1052 | 1 | 50 | 50 | 8523 |
| Obscurin | 48 | 162 | Immunoglobulin domain | PF00047 | 0 | 1085 | 1144 | 1 | 50 | 50 | 8523 |
| Obscurin | 48 | 162 | Immunoglobulin domain | PF00047 | 0 | 1177 | 1236 | 1 | 50 | 50 | 8523 |
| Obscurin | 48 | 162 | Immunoglobulin domain | PF00047 | 0 | 1269 | 1328 | 1 | 50 | 50 | 8523 |
| Obscurin | 48 | 162 | Immunoglobulin domain | PF00047 | 0 | 1361 | 1420 | 1 | 50 | 50 | 8523 |
| Obscurin | 48 | 162 | Immunoglobulin domain | PF00047 | 0 | 1453 | 1512 | 1 | 50 | 50 | 8523 |
| Obscurin | 48 | 162 | Immunoglobulin domain | PF00047 | 0 | 1545 | 1604 | 1 | 50 | 50 | 8523 |
| Obscurin | 48 | 162 | Immunoglobulin domain | PF00047 | 0 | 1637 | 1696 | 1 | 50 | 50 | 8523 |
| Obscurin | 48 | 162 | Immunoglobulin domain | PF00047 | 0 | 1731 | 1791 | 1 | 50 | 50 | 8523 |
| Obscurin | 48 | 162 | Immunoglobulin domain | PF00047 | 0 | 1821 | 1880 | 1 | 50 | 50 | 8523 |
| Obscurin | 48 | 162 | Immunoglobulin domain | PF00047 | 0 | 1911 | 1964 | 1 | 44 | 50 | 8523 |
| Obscurin | 48 | 162 | Immunoglobulin domain | PF00047 | 0 | 2176 | 2234 | 1 | 50 | 50 | 8523 |
| Obscurin | 48 | 162 | Immunoglobulin domain | PF00047 | 0 | 2264 | 2318 | 1 | 45 | 50 | 8523 |
| Obscurin | 48 | 162 | Immunoglobulin domain | PF00047 | 0 | 2353 | 2412 | 1 | 50 | 50 | 8523 |
| Obscurin | 48 | 162 | Immunoglobulin domain | PF00047 | 0 | 2532 | 2591 | 1 | 50 | 50 | 8523 |
| Obscurin | 48 | 162 | Immunoglobulin domain | PF00047 | 0 | 2621 | 2675 | 1 | 45 | 50 | 8523 |
| Obscurin | 48 | 162 | Immunoglobulin domain | PF00047 | 0 | 2710 | 2769 | 1 | 50 | 50 | 8523 |
| Obscurin | 48 | 162 | Immunoglobulin domain | PF00047 | 0 | 2799 | 2855 | 1 | 45 | 50 | 8523 |
| Obscurin | 48 | 162 | Immunoglobulin domain | PF00047 | 0 | 2890 | 2949 | 1 | 50 | 50 | 8523 |
| Obscurin | 48 | 162 | Immunoglobulin domain | PF00047 | 0 | 2979 | 3038 | 1 | 50 | 50 | 8523 |
| Obscurin | 48 | 162 | Immunoglobulin domain | PF00047 | 0 | 3068 | 3126 | 1 | 47 | 50 | 8523 |
| Obscurin | 48 | 162 | Immunoglobulin domain | PF00047 | 0 | 3159 | 3218 | 1 | 50 | 50 | 8523 |
| Obscurin | 48 | 162 | Immunoglobulin domain | PF00047 | 0 | 3248 | 3307 | 1 | 50 | 50 | 8523 |
| Obscurin | 48 | 162 | Immunoglobulin domain | PF00047 | 0 | 3337 | 3395 | 1 | 50 | 50 | 8523 |
| Obscurin | 48 | 162 | Immunoglobulin domain | PF00047 | 0 | 3425 | 3483 | 1 | 50 | 50 | 8523 |
| Obscurin | 48 | 162 | Immunoglobulin domain | PF00047 | 0 | 3513 | 3571 | 1 | 50 | 50 | 8523 |
| Obscurin | 48 | 162 | Immunoglobulin domain | PF00047 | 0 | 3601 | 3655 | 1 | 46 | 50 | 8523 |
| Obscurin | 48 | 162 | Immunoglobulin domain | PF00047 | 0 | 3690 | 3748 | 1 | 50 | 50 | 8523 |
| Obscurin | 48 | 162 | Immunoglobulin domain | PF00047 | 0 | 3778 | 3836 | 1 | 50 | 50 | 8523 |
| Obscurin | 48 | 162 | Immunoglobulin domain | PF00047 | 0 | 3866 | 3924 | 1 | 50 | 50 | 8523 |
| Obscurin | 48 | 162 | Immunoglobulin domain | PF00047 | 0 | 3954 | 4012 | 1 | 50 | 50 | 8523 |
| Obscurin | 48 | 162 | Immunoglobulin domain | PF00047 | 0 | 4042 | 4100 | 1 | 50 | 50 | 8523 |
| Obscurin | 48 | 162 | Immunoglobulin domain | PF00047 | 0 | 4130 | 4188 | 1 | 50 | 50 | 8523 |
| Obscurin | 48 | 162 | Immunoglobulin domain | PF00047 | 0 | 4218 | 4276 | 1 | 50 | 50 | 8523 |
| Obscurin | 48 | 162 | Immunoglobulin domain | PF00047 | 0 | 4306 | 4364 | 1 | 50 | 50 | 8523 |
| Obscurin | 48 | 162 | Immunoglobulin domain | PF00047 | 0 | 4394 | 4452 | 1 | 50 | 50 | 8523 |
| Obscurin | 48 | 162 | Immunoglobulin domain | PF00047 | 0 | 4482 | 4541 | 1 | 50 | 50 | 8523 |
| Obscurin | 48 | 162 | Immunoglobulin domain | PF00047 | 0 | 4571 | 4630 | 1 | 50 | 50 | 8523 |
| Obscurin | 48 | 162 | Immunoglobulin domain | PF00047 | 0 | 4660 | 4721 | 1 | 50 | 50 | 8523 |
| Obscurin | 48 | 162 | Immunoglobulin domain | PF00047 | 0 | 4751 | 4808 | 1 | 45 | 50 | 8523 |
| Obscurin | 48 | 162 | Immunoglobulin domain | PF00047 | 0 | 4843 | 4901 | 1 | 47 | 50 | 8523 |
| Obscurin | 48 | 162 | Immunoglobulin domain | PF00047 | 0 | 4933 | 4991 | 1 | 50 | 50 | 8523 |
| Obscurin | 48 | 162 | Immunoglobulin domain | PF00047 | 0 | 5025 | 5084 | 1 | 47 | 50 | 8523 |
| Obscurin | 48 | 162 | Immunoglobulin domain | PF00047 | 0 | 5233 | 5276 | 18 | 50 | 50 | 8523 |
| Obscurin | 48 | 162 | Immunoglobulin domain | PF00047 | 0 | 5488 | 5549 | 1 | 50 | 50 | 8523 |
| Obscurin | 48 | 162 | Immunoglobulin domain | PF00047 | 0 | 5718 | 5779 | 1 | 50 | 50 | 8523 |
| Obscurin | 48 | 162 | Immunoglobulin domain | PF00047 | 0 | 5860 | 5911 | 10 | 50 | 50 | 8523 |
| Obscurin | 48 | 162 | Immunoglobulin domain | PF00047 | 0 | 5961 | 6027 | 1 | 50 | 50 | 8523 |
| Obscurin | 48 | 162 | Immunoglobulin domain | PF00047 | 0 | 6604 | 6665 | 1 | 50 | 50 | 8523 |
| Obscurin | 48 | 162 | Immunoglobulin domain | PF00047 | 0 | 6698 | 6760 | 1 | 50 | 50 | 8523 |
| Obscurin | 48 | 162 | Immunoglobulin domain | PF00047 | 0 | 6951 | 7011 | 1 | 50 | 50 | 8523 |
| Obscurin | 48 | 162 | Immunoglobulin domain | PF00047 | 0 | 8031 | 8092 | 1 | 50 | 50 | 8523 |
| Obscurin | 48 | 162 | Protein kinase domain | PF00069 | 5.10E−111 | 7047 | 7300 | 1 | 294 | 294 | 8523 |
| Obscurin | 48 | 162 | Protein kinase domain | PF00069 | 5.10E−111 | 8227 | 8479 | 1 | 294 | 294 | 8523 |
| Obscurin | 48 | 162 | PH domain | PF00169 | 6.10E−12 | 6472 | 6580 | 1 | 85 | 85 | 8523 |
| Obscurin | 48 | 162 | IQ calmodulin-binding | PF00612 | 0.000004 | 5449 | 5469 | 1 | 21 | 21 | 8523 |
| | | | motif | | | | | | | | |
| Obscurin | 48 | 162 | RhoGEF domain | PF00621 | 4.00E−11 | 6273 | 6452 | 1 | 207 | 207 | 8523 |
| TSSK5 | 49 | 163 | Protein kinase domain | PF00069 | 1.10E−69 | 27 | 302 | 1 | 294 | 294 | 372 |
| CK1g3 | 50 | 164 | Protein kinase domain | PF00069 | 9.90E−34 | 43 | 284 | 1 | 264 | 294 | 448 |
| TTBK2 | 51 | 165 | Protein kinase domain | PF00069 | 5.00E−26 | 21 | 147 | 1 | 131 | 294 | 1243 |
| TTBK2 | 51 | 165 | Protein kinase domain | PF00069 | 5.00E−26 | 163 | 255 | 144 | 264 | 294 | 1243 |
| TTBK1 | 52 | 166 | Protein kinase domain | PF00069 | 8.80E−32 | 34 | 268 | 1 | 264 | 294 | 1308 |
| CHED | 53 | 167 | Protein kinase domain | PF00069 | 4.50E−93 | 705 | 998 | 1 | 294 | 294 | 1511 |
| PFTAIRE2 | 54 | 168 | Protein kinase domain | PF00069 | 4.00E−77 | 101 | 385 | 1 | 294 | 294 | 433 |
| CDKL5 | 55 | 169 | Protein kinase domain | PF00069 | 8.30E−84 | 13 | 297 | 1 | 294 | 294 | 904 |
| CDKL4 | 56 | 170 | Protein kinase domain | PF00069 | 8.40E−101 | 4 | 286 | 1 | 294 | 294 | 342 |
| DYRK4 | 57 | 171 | Protein kinase domain | PF00069 | 6.80E−56 | 173 | 475 | 1 | 294 | 294 | 592 |
| HIPK4 | 58 | 172 | Protein kinase domain | PF00069 | 9.50E−54 | 11 | 272 | 1 | 294 | 294 | 541 |
| ERK4 | 59 | 173 | Protein kinase domain | PF00069 | 5.50E−86 | 20 | 312 | 1 | 294 | 294 | 583 |
| AAK1 | 60 | 174 | Protein kinase domain | PF00069 | 1.40E−40 | 46 | 310 | 1 | 294 | 294 | 958 |
| NEK1 | 61 | 175 | Protein kinase domain | PF00069 | 4.60E−87 | 4 | 258 | 1 | 294 | 294 | 1275 |
| NEK5 | 62 | 176 | Protein kinase domain | PF00069 | 1.90E−88 | 4 | 255 | 1 | 294 | 294 | 778 |
| NEK10 | 63 | 177 | Protein kinase domain | PF00069 | 9.30E−68 | 519 | 783 | 1 | 294 | 294 | 1111 |
| SgK069 | 64 | 178 | Protein kinase domain | PF00069 | 3.80E−39 | 62 | 205 | 1 | 146 | 294 | 362 |
| SgK069 | 64 | 178 | Protein kinase domain | PF00069 | 3.80E−39 | 221 | 315 | 164 | 279 | 294 | 362 |
| SgK110 | 65 | 179 | Protein kinase domain | PF00069 | 1.30E−30 | 38 | 183 | 1 | 149 | 294 | 207 |
| SgK223 | 66 | 180 | Protein kinase domain | PF00069 | 1.10E−07 | 1098 | 1134 | 99 | 135 | 294 | 1373 |
| SgK223 | 66 | 180 | Protein kinase domain | PF00069 | 1.10E−07 | 1225 | 1297 | 189 | 294 | 294 | 1373 |
| SgK269 | 67 | 181 | Protein kinase domain | PF00069 | 0.000006 | 1479 | 1516 | 99 | 136 | 294 | 1735 |
| SgK269 | 67 | 181 | Protein kinase domain | PF00069 | 0.000006 | 1566 | 1657 | 168 | 294 | 294 | 1735 |
| CLIK1 | 68 | 182 | Protein kinase domain | PF00069 | 3.70E−55 | 207 | 528 | 1 | 288 | 294 | 539 |
| SgK307 | 69 | 183 | Ankyrin Repeat | PF00023 | 5.60E−11 | 55 | 87 | 1 | 33 | 33 | 1450 |
| SgK307 | 69 | 183 | Ankyrin Repeat | PF00023 | 5.60E−11 | 88 | 120 | 1 | 33 | 33 | 1450 |
| SgK307 | 69 | 183 | Protein kinase domain | PF00069 | 5.50E−16 | 295 | 369 | 54 | 124 | 294 | 1450 |
| SgK307 | 69 | 183 | Protein kinase domain | PF00069 | 5.50E−16 | 415 | 484 | 165 | 270 | 294 | 1450 |
| SgK424 | 70 | 184 | Ankyrin Repeat | PF00023 | 0.000019 | 25 | 57 | 1 | 33 | 33 | 469 |
| SgK424 | 70 | 184 | Ankyrin Repeat | PF00023 | 0.000019 | 99 | 111 | 21 | 33 | 33 | 469 |
| NRBP2 | 71 | 185 | Protein kinase domain | PF00069 | 4.70E−21 | 92 | 190 | 52 | 143 | 294 | 499 |
| NRBP2 | 71 | 185 | Protein kinase domain | PF00069 | 4.70E−21 | 230 | 304 | 178 | 294 | 294 | 499 |
| SgK493 | 72 | 186 | No domain identified | | | | | | | | |
| SgK496 | 73 | 187 | Protein kinase domain | PF00069 | 1.50E−41 | 650 | 895 | 1 | 280 | 294 | 927 |
| SgK071 | 74 | 188 | Protein kinase domain | PF00069 | 1.40E−22 | 55 | 184 | 18 | 142 | 294 | 626 |
| SgK071 | 74 | 188 | Protein kinase domain | PF00069 | 1.40E−22 | 227 | 255 | 166 | 197 | 294 | 626 |
| SgK071 | 74 | 188 | Protein kinase domain | PF00069 | 1.40E−22 | 303 | 323 | 271 | 294 | 294 | 626 |
| SgK384 | 75 | 189 | Protein kinase domain | PF00069 | 9.70E−82 | 27 | 283 | 1 | 294 | 294 | 599 |
| SgK384 | 75 | 189 | POLO box duplicated region | PF00659 | 3.60E−13 | 424 | 487 | 1 | 77 | 77 | 599 |
| SgK384 | 75 | 189 | POLO box duplicated region | PF00659 | 3.60E−13 | 522 | 537 | 3 | 18 | 77 | 599 |
| Fused | 76 | 190 | Protein kinase domain | PF00069 | 1.10E−99 | 4 | 254 | 1 | 294 | 294 | 1316 |
| ULK3 | 77 | 191 | Protein kinase domain | PF00069 | 1.60E−89 | 14 | 270 | 1 | 294 | 294 | 472 |
| ULK3 | 77 | 191 | MIT domain | PF04212 | 4.80E−18 | 277 | 346 | 1 | 74 | 74 | 472 |
| ULK3 | 77 | 191 | MIT domain | PF04212 | 4.80E−18 | 372 | 442 | 1 | 74 | 74 | 472 |
| ULK4 | 78 | 192 | Protein kinase domain | PF00069 | 3.70E−53 | 4 | 280 | 1 | 294 | 294 | 1275 |
| PIK3R4 | 79 | 193 | Protein kinase domain | PF00069 | 0.000002 | 104 | 158 | 79 | 135 | 294 | 1358 |
| PIK3R4 | 79 | 193 | Protein kinase domain | PF00069 | 0.000002 | 240 | 306 | 184 | 287 | 294 | 1358 |
| PIK3R4 | 79 | 193 | HEAT repeat | PF02985 | 0.000002 | 410 | 448 | 1 | 39 | 39 | 1358 |
| PIK3R4 | 79 | 193 | HEAT repeat | PF02985 | 0.000002 | 455 | 493 | 1 | 39 | 39 | 1358 |
| PIK3R4 | 79 | 193 | WD domain, G-beta repeat | PF00400 | 3.60E−21 | 983 | 1021 | 1 | 39 | 39 | 1358 |
| PIK3R4 | 79 | 193 | WD domain, G-beta repeat | PF00400 | 3.60E−21 | 1229 | 1269 | 1 | 39 | 39 | 1358 |
| PIK3R4 | 79 | 193 | WD domain, G-beta repeat | PF00400 | 3.60E−21 | 1319 | 1358 | 1 | 39 | 39 | 1358 |
| Wee1B | 80 | 194 | Protein kinase domain | PF00069 | 7.40E−42 | 208 | 475 | 1 | 288 | 294 | 555 |
| Wnk2 | 81 | 195 | Protein kinase domain | PF00069 | 3.70E−60 | 170 | 428 | 1 | 294 | 294 | 2132 |
| Wnk1 | 82 | 196 | Protein kinase domain | PF00069 | 3.40E−63 | 221 | 479 | 1 | 294 | 294 | 2377 |
| Wnk3 | 83 | 197 | Protein kinase domain | PF00069 | 1.30E−65 | 146 | 404 | 1 | 294 | 294 | 1751 |
| HSER | 84 | 198 | Protein kinase domain | PF00069 | 4.60E−19 | 537 | 628 | 59 | 146 | 294 | 1066 |
| HSER | 84 | 198 | Protein kinase domain | PF00069 | 4.60E−19 | 640 | 734 | 166 | 288 | 294 | 1066 |
| HSER | 84 | 198 | ANF_receptor | PF01094 | 6.30E−62 | 36 | 277 | 1 | 258 | 456 | 1066 |
| HSER | 84 | 198 | ANF_receptor | PF01094 | 6.30E−62 | 313 | 400 | 349 | 456 | 456 | 1066 |
| HSER | 84 | 198 | Guanylate cyclase catalytic | PF00211 | 2.10E−95 | 808 | 995 | 1 | 226 | 226 | 1066 |
| | | | domain | | | | | | | | |
| CYGX | 85 | 199 | Protein kinase domain | PF00069 | 6.70E−31 | 413 | 621 | 52 | 294 | 294 | 908 |
| CYGX | 85 | 199 | ANF_receptor | PF01094 | 7.10E−50 | 2 | 252 | 148 | 456 | 456 | 908 |
| CYGX | 85 | 199 | Guanylate cyclase catalytic | PF00211 | 1.30E−87 | 687 | 874 | 1 | 226 | 226 | 908 |
| | | | domain | | | | | | | | |
| KSGC | 86 | 200 | Protein kinase domain | PF00069 | 3.30E−28 | 600 | 827 | 44 | 292 | 294 | 1101 |
| KSGC | 86 | 200 | ANF_receptor | PF01094 | 3.80E−63 | 46 | 437 | 1 | 456 | 456 | 1101 |
| KSGC | 86 | 200 | Guanylate cyclase catalytic | PF00211 | 1.20E−86 | 893 | 1079 | 1 | 226 | 226 | 1101 |
| | | | domain | | | | | | | | |
| MAP3K6 | 87 | 201 | Protein kinase domain | PF00069 | 1.80E−73 | 654 | 907 | 6 | 294 | 294 | 1291 |
| MAP3K8 | 88 | 202 | Ankyrin Repeat | PF00023 | 0.000181 | 43 | 65 | 1 | 23 | 33 | 1388 |
| MAP3K8 | 88 | 202 | Ankyrin Repeat | PF00023 | 0.000181 | 72 | 117 | 1 | 33 | 33 | 1388 |
| MAP3K8 | 88 | 202 | Protein kinase domain | PF00069 | 2.40E−86 | 1121 | 1384 | 1 | 294 | 294 | 1388 |
| MAP3K7 | 89 | 203 | Protein kinase domain | PF00069 | 6.70E−79 | 610 | 861 | 6 | 294 | 294 | 1334 |
| OSR1 | 90 | 204 | Protein kinase domain | PF00069 | 2.70E−80 | 17 | 291 | 1 | 294 | 294 | 527 |
| ZC1 | 91 | 205 | Protein kinase domain | PF00069 | 1.20E−85 | 25 | 288 | 1 | 294 | 294 | 1328 |
| ZC1 | 91 | 205 | CNH domain | PF00780 | 5.80E−102 | 1015 | 1306 | 1 | 362 | 362 | 1328 |
| ZC2 | 92 | 206 | Protein kinase domain | PF00069 | 1.30E−83 | 25 | 288 | 1 | 294 | 294 | 1351 |
| ZC2 | 92 | 206 | CNH domain | PF00780 | 3.00E−96 | 1038 | 1329 | 1 | 362 | 362 | 1351 |
| ZC4 | 93 | 207 | Protein kinase domain | PF00069 | 8.10E−74 | 25 | 313 | 1 | 294 | 294 | 1539 |
| ZC4 | 93 | 207 | CNH domain | PF00780 | 1.40E−82 | 1166 | 1311 | 1 | 191 | 362 | 1539 |
| ZC4 | 93 | 207 | CNH domain | PF00780 | 1.40E−82 | 1358 | 1513 | 190 | 362 | 362 | 1539 |
| MYO3B | 94 | 208 | Protein kinase domain | PF00069 | 8.60E−78 | 15 | 281 | 1 | 294 | 294 | 1613 |
| MYO3B | 94 | 208 | IQ calmodulin-binding motif | PF00612 | 3.50E−08 | 1043 | 1063 | 1 | 21 | 21 | 1613 |
| MYO3B | 94 | 208 | IQ calmodulin-binding motif | PF00612 | 3.50E−08 | 1070 | 1090 | 1 | 21 | 21 | 1613 |
| MYO3B | 94 | 208 | Myosin head (motor domain) | PF00063 | 1.70E−232 | 333 | 1028 | 1 | 734 | 734 | 1613 |
| PAK6 | 95 | 209 | Protein kinase domain | PF00069 | 6.10E−78 | 408 | 659 | 1 | 294 | 294 | 682 |
| PAK6 | 95 | 209 | P21-Rho-binding domain | PF00786 | 9.10E−11 | 12 | 46 | 1 | 37 | 64 | 682 |
| STLK5 | 96 | 210 | Protein kinase domain | PF00069 | 1.60E−30 | 69 | 212 | 1 | 143 | 294 | 431 |
| STLK5 | 96 | 210 | Protein kinase domain | PF00069 | 1.60E−30 | 241 | 298 | 164 | 256 | 294 | 431 |
| STLK5 | 96 | 210 | Protein kinase domain | PF00069 | 1.60E−30 | 355 | 379 | 267 | 294 | 294 | 431 |
| TAO2 | 97 | 211 | Protein kinase domain | PF00069 | 1.50E−72 | 28 | 281 | 1 | 294 | 294 | 1240 |
| TAO3 | 98 | 212 | Protein kinase domain | PF00069 | 1.00E−73 | 24 | 277 | 1 | 294 | 294 | 898 |
| TIF1g | 99 | 213 | Bromodomain | PF00439 | 9.50E−20 | 994 | 1066 | 19 | 92 | 92 | 1142 |
| TIF1g | 99 | 213 | PHD finger | PF00628 | 1.50E−14 | 196 | 202 | 1 | 7 | 51 | 1142 |
| TIF1g | 99 | 213 | PHD finger | PF00628 | 1.50E−14 | 250 | 260 | 41 | 51 | 51 | 1142 |
| TIF1g | 99 | 213 | PHD finger | PF00628 | 1.50E−14 | 904 | 947 | 1 | 49 | 51 | 1142 |
| TIF1g | 99 | 213 | B-box zinc finger | PF00643 | 1.20E−24 | 228 | 275 | 1 | 48 | 48 | 1142 |
| TIF1g | 99 | 213 | B-box zinc finger | PF00643 | 1.20E−24 | 287 | 328 | 1 | 48 | 48 | 1142 |
| ErbB3 | 100 | 214 | Protein kinase domain | PF00069 | 2.50E−62 | 707 | 959 | 1 | 288 | 294 | 1339 |
| ErbB3 | 100 | 214 | Furin-like cysteine-rich | PF00757 | 2.10E−93 | 180 | 332 | 1 | 183 | 183 | 1339 |
| | | | region | | | | | | | | |
| ErbB3 | 100 | 214 | Furin-like cysteine-rich | PF00757 | 2.10E−93 | 490 | 515 | 1 | 44 | 183 | 1339 |
| | | | region | | | | | | | | |
| ErbB3 | 100 | 214 | Furin-like cysteine-rich | PF00757 | 2.10E−93 | 517 | 533 | 92 | 108 | 183 | 1339 |
| | | | region | | | | | | | | |
| ErbB3 | 100 | 214 | Furin-like cysteine-rich | PF00757 | 2.10E−93 | 607 | 629 | 1 | 46 | 183 | 1339 |
| | | | region | | | | | | | | |
| ErbB3 | 100 | 214 | Receptor L domain | PF01030 | 6.90E−101 | 55 | 178 | 1 | 154 | 154 | 1339 |
| ErbB3 | 100 | 214 | Receptor L domain | PF01030 | 6.90E−101 | 353 | 485 | 1 | 154 | 154 | 1339 |
| EphA5 | 101 | 215 | Fibronectin type III domain | PF00041 | 1.30E−32 | 360 | 456 | 1 | 84 | 84 | 1041 |
| EphA5 | 101 | 215 | Fibronectin type III domain | PF00041 | 1.30E−32 | 471 | 554 | 1 | 84 | 84 | 1041 |
| EphA5 | 101 | 215 | Protein kinase domain | PF00069 | 8.60E−81 | 678 | 935 | 1 | 292 | 294 | 1041 |
| EphA5 | 101 | 215 | Ephrin receptor ligand | PF01404 | 1.90E−139 | 62 | 235 | 1 | 177 | 177 | 1041 |
| | | | binding domain | | | | | | | | |
| EphA5 | 101 | 215 | SAM domain (Sterile alpha | PF00536 | 9.20E−25 | 966 | 1031 | 1 | 68 | 68 | 1041 |
| | | | motif) | | | | | | | | |
| EphA6 | 102 | 216 | Fibronectin type III domain | PF00041 | 7.90E−24 | 426 | 519 | 1 | 84 | 84 | 1130 |
| EphA6 | 102 | 216 | Fibronectin type III domain | PF00041 | 7.90E−24 | 534 | 621 | 1 | 84 | 84 | 1130 |
| EphA6 | 102 | 216 | Protein kinase domain | PF00069 | 6.10E−72 | 725 | 1024 | 1 | 294 | 294 | 1130 |
| EphA6 | 102 | 216 | Ephrin receptor ligand | PF01404 | 1.60E−140 | 128 | 301 | 1 | 177 | 177 | 1130 |
| | | | binding domain | | | | | | | | |
| EphA6 | 102 | 216 | SAM domain (Sterile alpha | PF00536 | 9.80E−26 | 1053 | 1117 | 1 | 68 | 68 | 1130 |
| | | | motif) | | | | | | | | |
| LMR2 | 103 | 217 | Protein kinase domain | PF00069 | 2.00E−21 | 136 | 404 | 1 | 294 | 294 | 1469 |
| LMR3 | 104 | 218 | Protein kinase domain | PF00069 | 2.00E−48 | 133 | 408 | 1 | 294 | 294 | 1431 |
| FGR | 105 | 219 | SH3 domain | PF00018 | 2.20E−25 | 68 | 124 | 1 | 58 | 58 | 517 |
| FGR | 105 | 219 | Protein kinase domain | PF00069 | 1.20E−75 | 251 | 500 | 1 | 294 | 294 | 517 |
| FGR | 105 | 219 | SH2 domain | PF00017 | 6.30E−53 | 132 | 214 | 1 | 79 | 79 | 517 |
| LRRK2 | 106 | 220 | Protein kinase domain | PF00069 | 1.10E−33 | 1836 | 2079 | 7 | 288 | 294 | 2478 |
| LRRK2 | 106 | 220 | Leucine Rich Repeat | PF00560 | 4.60E−28 | 796 | 822 | 5 | 25 | 25 | 2478 |
| LRRK2 | 106 | 220 | Leucine Rich Repeat | PF00560 | 4.60E−28 | 983 | 1005 | 1 | 25 | 25 | 2478 |
| LRRK2 | 106 | 220 | Leucine Rich Repeat | PF00560 | 4.60E−28 | 1012 | 1035 | 1 | 25 | 25 | 2478 |
| LRRK2 | 106 | 220 | Leucine Rich Repeat | PF00560 | 4.60E−28 | 1036 | 1058 | 1 | 25 | 25 | 2478 |
| LRRK2 | 106 | 220 | Leucine Rich Repeat | PF00560 | 4.60E−28 | 1084 | 1107 | 1 | 25 | 25 | 2478 |
| LRRK2 | 106 | 220 | Leucine Rich Repeat | PF00560 | 4.60E−28 | 1108 | 1129 | 1 | 25 | 25 | 2478 |
| LRRK2 | 106 | 220 | Leucine Rich Repeat | PF00560 | 4.60E−28 | 1130 | 1153 | 1 | 25 | 25 | 2478 |
| LRRK2 | 106 | 220 | Leucine Rich Repeat | PF00560 | 4.60E−28 | 1174 | 1196 | 1 | 25 | 25 | 2478 |
| LRRK2 | 106 | 220 | Leucine Rich Repeat | PF00560 | 4.60E−28 | 1197 | 1218 | 1 | 25 | 25 | 2478 |
| LRRK2 | 106 | 220 | Leucine Rich Repeat | PF00560 | 4.60E−28 | 1221 | 1242 | 1 | 25 | 25 | 2478 |
| LRRK2 | 106 | 220 | Leucine Rich Repeat | PF00560 | 4.60E−28 | 1246 | 1268 | 1 | 25 | 25 | 2478 |
| LRRK2 | 106 | 220 | Leucine Rich Repeat | PF00560 | 4.60E−28 | 1269 | 1292 | 1 | 25 | 25 | 2478 |
| LRRK1 | 107 | 221 | Ankyrin Repeat | PF00023 | 0.000041 | 81 | 97 | 6 | 22 | 33 | 2004 |
| LRRK1 | 107 | 221 | Ankyrin Repeat | PF00023 | 0.000041 | 116 | 131 | 8 | 23 | 33 | 2004 |
| LRRK1 | 107 | 221 | Ankyrin Repeat | PF00023 | 0.000041 | 147 | 175 | 6 | 33 | 33 | 2004 |
| LRRK1 | 107 | 221 | Ankyrin Repeat | PF00023 | 0.000041 | 187 | 208 | 5 | 26 | 33 | 2004 |
| LRRK1 | 107 | 221 | Protein kinase domain | PF00069 | 1.90E−43 | 1232 | 1507 | 1 | 289 | 294 | 2004 |
| LRRK1 | 107 | 221 | Leucine Rich Repeat | PF00560 | 4.20E−20 | 269 | 292 | 1 | 25 | 25 | 2004 |
| LRRK1 | 107 | 221 | Leucine Rich Repeat | PF00560 | 4.20E−20 | 293 | 308 | 1 | 17 | 25 | 2004 |
| LRRK1 | 107 | 221 | Leucine Rich Repeat | PF00560 | 4.20E−20 | 320 | 342 | 1 | 25 | 25 | 2004 |
| LRRK1 | 107 | 221 | Leucine Rich Repeat | PF00560 | 4.20E−20 | 371 | 394 | 1 | 25 | 25 | 2004 |
| LRRK1 | 107 | 221 | Leucine Rich Repeat | PF00560 | 4.20E−20 | 395 | 418 | 1 | 25 | 25 | 2004 |
| LRRK1 | 107 | 221 | Leucine Rich Repeat | PF00560 | 4.20E−20 | 441 | 461 | 1 | 22 | 25 | 2004 |
| LRRK1 | 107 | 221 | Leucine Rich Repeat | PF00560 | 4.20E−20 | 464 | 480 | 1 | 18 | 25 | 2004 |
| LRRK1 | 107 | 221 | Leucine Rich Repeat | PF00560 | 4.20E−20 | 488 | 507 | 1 | 25 | 25 | 2004 |
| LRRK1 | 107 | 221 | Leucine Rich Repeat | PF00560 | 4.20E−20 | 539 | 561 | 1 | 25 | 25 | 2004 |
| LRRK1 | 107 | 221 | Leucine Rich Repeat | PF00560 | 4.20E−20 | 562 | 585 | 1 | 25 | 25 | 2004 |
| LRRK1 | 107 | 221 | Leucine Rich Repeat | PF00560 | 4.20E−20 | 586 | 604 | 1 | 20 | 25 | 2004 |
| LRRK1 | 107 | 221 | Leucine Rich Repeat | PF00560 | 4.20E−20 | 1174 | 1196 | 1 | 25 | 25 | 2004 |
| LZK | 108 | 222 | Protein kinase domain | PF00069 | 5.30E−79 | 167 | 408 | 1 | 294 | 294 | 959 |
| MLK2 | 109 | 223 | SH3 domain | PF00018 | 1.80E−15 | 19 | 79 | 1 | 58 | 58 | 940 |
| MLK2 | 109 | 223 | Protein kinase domain | PF00069 | 4.90E−85 | 98 | 359 | 1 | 294 | 294 | 940 |
| BRAF | 110 | 224 | Protein kinase domain | PF00069 | 4.90E−83 | 475 | 734 | 1 | 294 | 294 | 784 |
| BRAF | 110 | 224 | Phorbol esters/diacylglycerol | PF00130 | 1.00E−16 | 252 | 297 | 1 | 51 | 51 | 784 |
| | | | binding domain (C1 domain) | | | | | | | | |
| BRAF | 110 | 224 | Raf-like Ras-binding domain | PF02196 | 1.90E−37 | 172 | 244 | 1 | 77 | 77 | 784 |
| KSR2 | 111 | 225 | Protein kinase domain | PF00069 | 9.60E−41 | 682 | 941 | 1 | 289 | 294 | 965 |
| KSR2 | 111 | 225 | Phorbol esters/diacylglycerol | PF00130 | 0.000128 | 420 | 463 | 1 | 51 | 51 | 965 |
| | | | binding domain (C1 domain) | | | | | | | | |
| DGKd | 112 | 226 | Phorbol esters/diacylglycerol | PF00130 | 5.50E−17 | 106 | 155 | 1 | 51 | 51 | 1158 |
| | | | binding domain (C1 domain) | | | | | | | | |
| DGKd | 112 | 226 | Phorbol esters/diacylglycerol | PF00130 | 5.50E−17 | 178 | 228 | 1 | 51 | 51 | 1158 |
| | | | binding domain (C1 domain) | | | | | | | | |
| DGKd | 112 | 226 | PH domain | PF00169 | 6.60E−15 | 2 | 88 | 7 | 85 | 85 | 1158 |
| DGKd | 112 | 226 | Diacylglycerol kinase | PF00609 | 1.10E−60 | 707 | 864 | 1 | 190 | 190 | 1158 |
| | | | accessory domain | | | | | | | | |
| DGKd | 112 | 226 | Diacylglycerol kinase | PF00781 | 1.80E−62 | 263 | 388 | 1 | 154 | 154 | 1158 |
| | | | catalytic domain | | | | | | | | |
| DGKd | 112 | 226 | SAM domain (Sterile alpha | PF00536 | 2.30E−21 | 1087 | 1150 | 1 | 68 | 68 | 1158 |
| | | | motif) | | | | | | | | |
| DGKi | 113 | 227 | Ankyrin Repeat | PF00023 | 2.80E−10 | 934 | 958 | 1 | 25 | 33 | 1041 |
| DGKi | 113 | 227 | Ankyrin Repeat | PF00023 | 2.80E−10 | 970 | 1002 | 1 | 33 | 33 | 1041 |
| DGKi | 113 | 227 | Diacylglycerol kinase | PF00609 | 2.90E−57 | 521 | 678 | 1 | 190 | 190 | 1041 |
| | | | accessory domain | | | | | | | | |
| DGKi | 113 | 227 | Diacylglycerol kinase | PF00781 | 4.40E−59 | 371 | 495 | 1 | 154 | 154 | 1041 |
| | | | catalytic domain | | | | | | | | |
| DGKq | 114 | 228 | Diacylglycerol kinase | PF00609 | 1.90E−87 | 733 | 885 | 1 | 190 | 190 | 934 |
| | | | accessory domain | | | | | | | | |
| DGKq | 114 | 228 | Diacylglycerol kinase | PF00781 | 4.10E−63 | 580 | 707 | 1 | 154 | 154 | 934 |
| | | | catalytic domain | | | | | | | | |
| DGKq | 114 | 228 | Phorbol esters/diacylglycerol | PF00130 | 1.00E−27 | 55 | 102 | 1 | 51 | 51 | 934 |
| | | | binding domain (C1 domain) | | | | | | | | |
| DGKq | 114 | 228 | Phorbol esters/diacylglycerol | PF00130 | 1.00E−27 | 116 | 162 | 1 | 51 | 51 | 934 |
| | | | binding domain (C1 domain) | | | | | | | | |
| DGKq | 114 | 228 | Phorbol esters/diacylglycerol | PF00130 | 1.00E−27 | 178 | 228 | 1 | 51 | 51 | 934 |
| | | | binding domain (C1 domain) | | | | | | | | |
| DGKq | 114 | 228 | Ras association | PF00788 | 6.60E−24 | 387 | 486 | 1 | 113 | 113 | 934 |
| | | | (RalGDS/AF-6) domain | | | | | | | | |
| DGKq | 114 | 228 | Ras association | PF00788 | 6.60E−24 | 565 | 586 | 60 | 89 | 113 | 934 |
| | | | (RalGDS/AF-6) domain | | | | | | | | |

[0465] Table 4 provides the chromosomal location of the sequences, described in the following columns: Gene_Name, ID#na, ID#aa, Chromosome, Band Name, Genomic Coordinate Start, Genomic Coordinate end”. The first three columns are identical to the equivalent columns in Table 1. “Chromosome” lists the chromosome to which the mouse gene was mapped, and “Band Name” lists the band within the chromosome to which the gene was mapped. To provide more detailed mapping, the beginning and ending nucleotides of the gene mapped to the mouse genomic assembly (February 2003, genome.ucsc.edu) are provided as “Genomic Coordinate Start” and “Genomic Coordinate End”. This mapping information can be used to link mouse genes to genetically mapped traits, including disease susceptibility and modified loci. Resources such as the website of the Jackson laboratory, www.informatics.jax.org/ can be used to search a given chromosomal locus against a large database of mapped traits.

TABLE 4

| Gene_{—} | | | | | | Genomic Coordinate | |
|---|---|---|---|---|---|---|---|
| Name | ID#na | ID#aa | Chromosome | Band | Name | Start | Genomic Coordinate End |
| mSK840 | 34 | 148 | Unknown | | | 40058520 | 40060064 |
| mSK813 | 25 | 139 | | 5 | A1 | 8803350 | 8804386 |
| mSK801 | 18 | 132 | | 10 | E3.1 | 86129275 | 86130749 |
| mSK838 | 33 | 147 | Unknown | | | 1.11E+08 | 1.11E+08 |
| mSK836 | 32 | 146 | Unknown | | | 98125490 | 98126283 |
| mSK807 | 21 | 135 | | 17 | B5 | 52062939 | 52064372 |
| mSK826 | 31 | 145 | | 17 | B5 | 52281242 | 52282804 |
| mSK822 | 29 | 143 | | 5 | A1 | 5682924 | 5684777 |
| mSK823 | 30 | 144 | | 16 | A2 | 12247230 | 12248457 |
| AAK1 | 60 | 174 | | 6 | E2 | 87352915 | 87490724 |
| ADCK4 | 9 | 123 | | 7 | A2 | 18803500 | 18828331 |
| ADCK5 | 10 | 124 | | 15 | D3 | 76809739 | 76829324 |
| AlphaK2 | 11 | 125 | | 18 | E1.3 | 65678368 | 65762585 |
| AlphaK3 | 12 | 126 | | 3 | F3 | 1.28E+08 | 1.28E+08 |
| AMPKa1 | 15 | 129 | | 15 | A1 | 4972560 | 5007441 |
| ATR | 14 | 128 | | 9 | C5 | 95840959 | 95934822 |
| BCR | 13 | 127 | | 10 | E1 | 74818264 | 74942231 |
| BRAF | 110 | 224 | | 6 | B2 | 39598557 | 39710045 |
| CDKL4 | 56 | 170 | | 17 | C3.1 | 79167222 | 79202454 |
| CDKL5 | 55 | 169 | X | | | 1.41E+08 | 1.41E+08 |
| CHED | 53 | 167 | | 13 | A3 | 17128253 | 17216747 |
| CK1g3 | 50 | 164 | | 18 | D | 54260451 | 54318906 |
| CLIK1 | 68 | 182 | | 2 | E4 | 1.31E+08 | 1.31E+08 |
| CYGX | 85 | 199 | | 7 | D1 | 86885718 | 86919278 |
| DCAMKL1 | 38 | 152 | | 3 | C1 | 55417995 | 55708086 |
| DMPK2 | 1 | 115 | | 19 | A1 | 4349504 | 4367998 |
| DYRK4 | 57 | 171 | | 6 | F | 1.28E+08 | 1.28E+08 |
| EphA5 | 101 | 215 | | 5 | C3 | 83261624 | 83629264 |
| EphA6 | 102 | 216 | | 16 | D3 | 60017301 | 60969918 |
| ErbB3 | 100 | 214 | | 10 | | 1.29E+08 | 1.29E+08 |
| ERK4 | 59 | 173 | | 18 | E3 | 74379471 | 74419963 |
| FGR | 105 | 219 | | 4 | H1 | 1.31E+08 | 1.31E+08 |
| Fused | 76 | 190 | | 1 | B | 75323325 | 75357938 |
| HIPK4 | 58 | 172 | | 7 | A2 | 19097192 | 19104845 |
| HSER | 84 | 198 | | 6 | G1 | 1.37E+08 | 1.37E+08 |
| KSR2 | 111 | 225 | | 5 | D1 | 1.15E+08 | 1.15E+08 |
| LATS1 | 5 | 119 | | 10 | A1 | 7360382 | 7383385 |
| LMR2 | 103 | 217 | | 5 | E1 | 1.42E+08 | 1.42E+08 |
| LMR3 | 104 | 218 | | 7 | B1 | 34425932 | 34446495 |
| LRRK1 | 107 | 221 | | 7 | B3 | 54384355 | 54513746 |
| LRRK2 | 106 | 220 | | 15 | E2.2 | 92009360 | 92152361 |
| LZK | 108 | 222 | | 16 | B1 | 21542876 | 21677814 |
| MAP3K6 | 87 | 201 | | 4 | H1 | 1.31E+08 | 1.31E+08 |
| MAP3K7 | 89 | 203 | X | | | 1.4E+08 | 1.4E+08 |
| MAP3K8 | 88 | 202 | | 1 | F2 | 1.28E+08 | 1.28E+08 |
| MAST1 | 4 | 118 | | 8 | E3 | 84197422 | 84223752 |
| MAST3 | 3 | 117 | | 8 | D2 | 69807090 | 69824805 |
| MLK2 | 109 | 223 | | 7 | A2 | 19228735 | 19246743 |
| MNK2 | 39 | 153 | | 10 | E2 | 80495182 | 80505314 |
| MRCKb | 2 | 116 | | 12 | E1 | 1.05E+08 | 1.05E+08 |
| MYO3B | 94 | 208 | | 2 | C3 | 71042476 | 71306595 |
| NEK1 | 61 | 175 | | 8 | C | 59864996 | 60003408 |
| NEK10 | 63 | 177 | | 14 | A1 | 10133105 | 10315949 |
| NRBP2 | 71 | 185 | | 15 | D3 | 76318086 | 76324114 |
| NuaK1 | 36 | 150 | | 10 | E3.1 | 83967390 | 84036260 |
| Obscurin | 48 | 162 | | 11 | B3 | 59625580 | 59767608 |
| OSR1 | 90 | 204 | | 9 | E1 | 1.19E+08 | 1.19E+08 |
| PFTAIRE2 | 54 | 168 | | 1 | A7.1 | 59896060 | 59991807 |
| PIK3R4 | 79 | 193 | | 9 | D2 | 1.06E+08 | 1.06E+08 |
| PIM2 | 44 | 158 | X | | | 4046288 | 4051524 |
| PKN1 | 6 | 120 | | 8 | E2 | 82947703 | 82971074 |
| NEK5 | 62 | 176 | | 8 | A3 | 20813711 | 20865690 |
| PAK6 | 95 | 209 | | 2 | E2 | 1.2E+08 | 1.2E+08 |
| Wnk3 | 83 | 197 | X | | | 1.31E+08 | 1.31E+08 |
| QSK | 37 | 151 | | 9 | B2 | 46061725 | 46269266 |
| RSKL1 | 8 | 122 | | 1 | | 1.91E+08 | 1.91E+08 |
| SgK069 | 64 | 178 | | 7 | A1 | 4350169 | 4357441 |
| SgK071 | 74 | 188 | | 2 | A5 | 27198128 | 27217842 |
| SgK085 | 43 | 157 | | 13 | B2 | 32158136 | 32227151 |
| SgK110 | 65 | 179 | | 7 | A1 | 4360875 | 4364020 |
| SgK223 | 66 | 180 | | 8 | B2 | 35011042 | 35063725 |
| SgK269 | 67 | 181 | | 9 | B3.2 | 56361043 | 56574342 |
| SgK307 | 69 | 183 | | 11 | C2 | 88181839 | 88332597 |
| SgK424 | 70 | 184 | | 7 | A3 | 22124703 | 22129866 |
| SgK493 | 72 | 186 | | 17 | C3.2 | 81878502 | 81887438 |
| SGK494 | 7 | 121 | | 11 | C1 | 79076053 | 79080078 |
| SgK496 | 73 | 187 | | 1 | F3 | 1.33E+08 | 1.33E+08 |
| skMLCK | 42 | 156 | | 2 | G2 | 1.55E+08 | 1.55E+08 |
| smMLCK | 40 | 154 | | 16 | B3.3 | 34577543 | 34793209 |
| SPEG | 47 | 161 | | 1 | C1 | 76072916 | 76129585 |
| STLK5 | 96 | 210 | | 11 | D1 | 1.07E+08 | 1.07E+08 |
| TAO2 | 97 | 211 | | 7 | E3 | 1.16E+08 | 1.16E+08 |
| TAO3 | 98 | 212 | | 5 | C7 | 1.14E+08 | 1.15E+08 |
| TIF1g | 99 | 213 | | 3 | E3 | 1.04E+08 | 1.04E+08 |
| Trad | 46 | 160 | | 16 | B3.3 | 33761991 | 34185222 |
| Trio | 45 | 159 | | 15 | B | 27685910 | 27979596 |
| TTBK1 | 52 | 166 | | 17 | B5 | 44695383 | 44737979 |
| TTBK2 | 51 | 165 | | 2 | E2 | 1.22E+08 | 1.22E+08 |
| TTN | 41 | 155 | | | | | |
| ULK3 | 77 | 191 | | 9 | B3.2 | 57755506 | 57761245 |
| ULK4 | 78 | 192 | | 9 | E1 | 1.21E+08 | 1.22E+08 |
| Wee1B | 80 | 194 | | 6 | B2 | 40436112 | 40457399 |
| Wnk1 | 82 | 196 | | 6 | F | 1.21E+08 | 1.21E+08 |
| Wnk2 | 81 | 195 | | 13 | C1 | 48577228 | 48685142 |
| ZC1 | 91 | 205 | | 1 | A4 | 40327787 | 40452664 |
| ZC2 | 92 | 206 | | 3 | A3 | 28060651 | 28469872 |
| ZC4 | 93 | 207 | X | | | 1.21E+08 | 1.21E+08 |
| KSGC | 86 | 200 | | 19 | D1 | 54955950 | 54999845 |
| SgK384 | 75 | 189 | | 10 | E2 | 80178484 | 80189649 |
| TSSK5 | 49 | 163 | | 15 | D3 | 76603770 | 76607059 |
| DGKd | 112 | 226 | | 1 | C3 | 88074525 | 88139521 |
| DGKi | 113 | 227 | | 6 | B2 | 36828079 | 37281470 |
| DGKq | 114 | 228 | | 5 | C7 | 1.06E+08 | 1.06E+08 |
| mSK843 | 35 | 149 | | 11 | A3 | 21588602 | 21589567 |
| mSK804 | 19 | 133 | | 10 | E3.1 | 86129275 | 86130749 |
| mSK798 | 17 | 131 | Unknown | | | 51249573 | 51250574 |
| mSK817 | 28 | 142 | | 7 | A2 | 15371293 | 15371829 |
| mSK805 | 20 | 134 | | 6 | E3 | 91892181 | 91893257 |
| mSK794 | 16 | 130 | | 11 | A3 | 21588122 | 21589567 |
| mSK814 | 26 | 140 | | 1 | A6 | 53951048 | 53951677 |
| mSK811 | 24 | 138 | | 13 | A3 | 21320755 | 21321673 |
| mSK815 | 27 | 141 | | 7 | A2 | 15221141 | 15222294 |
| mSK809 | 23 | 137 | | 17 | B5 | 52005042 | 52006468 |
| mSK808 | 22 | 136 | | 2 | E3 | 1.29E+08 | 1.29E+08 |

### EXAMPLES

[0466] The examples below are not limiting and are merely representative of various aspects and features of the present invention. The examples below demonstrate the isolation and characterization of the nucleic acid molecules according to the invention, as well as the polypeptides they encode.

### Example 1

### Identification and Characterization of Genomic Fragments Encoding Protein Kinases

[0467] Novel kinases were identified from the public Human Genome Sequencing project (www.ncbi.nlm.nih.gov/) using a hidden Markov model (HMM) built with 70 mammalian and yeast kinase catalytic domain sequences. These sequences were chosen from a comprehensive collection of kinases such that no two sequences had more than 50% sequence identity. The genomic database entries were translated in six open reading frames and searched against the model using a Timelogic Decypher box with a Field programmable array (FPGA) accelerated version of HMMR2.1. The DNA sequences encoding the predicted protein sequences aligning to the HMMR profile were extracted from the original genomic database. The nucleic acid sequences were then clustered using the Pangea Clustering tool to eliminate repetitive entries. The putative protein kinase sequences were then sequentially run through a series of queries and filters to identify novel protein kinase sequences. Specifically, the HMMR identified sequences were searched using BLASTN and BLASTX against a nucleotide and amino acid repository containing all known mouse and human protein kinases and all subsequent new protein kinase sequences as they are identified. The output was parsed into a spreadsheet to facilitate elimination of known genes by manual inspection. Two models were developed, a “complete” model and a “partial” or Smith Waterman model. The partial model was used to identify sub-catalytic kinase domains, whereas the complete model was used to identify complete catalytic domains. The selected hits were then queried using BLASTN against the public nrna and EST databases to confirm they are indeed unique. In some cases the novel genes were judged to be homologues of previously identified rodent or vertebrate protein kinases.

[0468] Extension of partial DNA sequences to encompass the full-length open-reading frame was carried out by several methods. Iterative blastn searching of the cDNA databases listed in Table 5 was used to find cDNAs that extended the genomic sequences. “ZooSeq” databases are from Incyte Genomics, Inc (www.incyte.com/). NCBI databases are from the National Center for Biotechnology Information (www.ncbi.nlm.nih.gov/). All blastn searches were conducted using a penalty for a nucleotide mismatch of −3 and reward for a nucleotide match of 1. The gapped blast algorithm is described in: Altschul, Stephen F., Thomas L. Madden, Alejandro A. Schaffer, Jinghui Zhang, Zheng Zhang, Webb Miller, and David J. Lipman (1997), “Gapped BLAST and PSI-BLAST: a new generation of protein database search programs”, Nucleic Acids Res. 25:3389-3402).

[0469] Extension of partial DNA sequences to encompass the full-length open-reading frame was also carried out by iterative searches of genomic databases. The first method made use of the Smith-Waterman algorithm to carry out protein-protein searches of a close protein homologue to the partial. The target databases consisted of Genscan and open-reading frame (ORF) predictions of all mouse genomic sequence derived from the mouse genome project. The complete set of genomic databases searched is shown in Table 6, below. Genomic sequences encoding potential extensions were further assessed by blastx analysis against the NCBI nonredundant database to confirm the novelty of the hit. The extending genomic sequences were incorporated into the cDNA sequence after removal of potential introns using the Seqman program from DNAStar. The default parameters used for Smith-Waterman searches were as shown next. Matrix: blosum 62; gap-opening penalty: 12; gap extension penalty: 2. Genscan predictions were made using the Genscan program as detailed in Chris Burge and Sam Karlin “Prediction of Complete Gene Structures in Human Genomic DNA”, JMB (1997) 268(1):78-94). ORF predictions from genomic DNA were made using a standard 6-frame translation.

[0470] Another method for defining DNA extensions from genomic sequence used iterative searches of genomic databases through the Genscan program to predict exon splicing. These predicted genes were then assessed to see if they represented “real” extensions of the partial genes based on homology to related kinases.

[0471] Another method involved using the Genewise program (www.sanger.ac.uk/Software/Wise2) to predict potential ORFs based on homology to the closest orthologue/homologue. Genewise requires two inputs, the homologous protein, and genomic DNA containing the gene of interest. The genomic DNA was identified by blastn searches of Celera and Human Genome Project databases. The orthologs were identified by blastp searches of the NCBI non-redundant protein database (NRAA). Genewise compares the protein sequence to a genomic DNA sequence, allowing for introns and frameshifting errors.

TABLE 5
Databases used for cDNA-based sequence extensions

| Database | Database Date |
|---|---|
| ZooSeq Mouse | September 2002 |
| Pharmacia mouse EST | March 2003 |
| collection | |
| NCBI human Ests | March 2003 |
| NCBI murine Ests | March 2003 |
| NCBI nonredundant | March 2003 |

[0472] TABLE 6
Databases used for genomic-based sequence extensions

| | Number of | Database |
|---|---|---|
| Database | entries | Date |
| Mouse Genome Project draft | 23 | March 2003 |
| assembly | | |

[0473] Results:

[0474] For genes that were extended using Genewise, the accession numbers of the protein ortholog and the genomic DNA are given. (Genewise uses the ortholog to assemble the coding sequence of the target gene from the genomic sequence). The amino acid sequences for the orthologs were obtained from the NCBI non-redundant database of proteins (www.ncbi.nlm.nih.gov/Entrez/protein.html) and from internal sources, including KinBase (kinase.com). The genomic DNA came from the public mouse genome project, as indicated below. cDNA sources are also listed below. All of the genomic sequences were used as input for Genscan predictions to predict splice sites [Burge and Karlin, JMB (1997) 268(1):78-94)]. Abbreviations: HGP: Human Genome Project; NCBI, National Center for Biotechnology Information.

### Example 2

### Isolation of cDNAs Encoding Mammalian Protein Kinases

[0475] Materials and Methods

[0476] Identification of Novel Clones

[0477] Total RNAs are isolated using the Guanidine Salts/Phenyl extraction protocol of Chomczynski and Sacchi (P. Chomczynski and N. Sacchi, Anal. Biochem. 162, 156 (1987)) from primary mammalian tumors, normal and tumor cell lines, normal mammalian tissues, and sorted mammalian hematopoietic cells. These RNAs are used to generate single-stranded cDNA using the Superscript Preamplification System (GIBCO BRL, Gaithersburg, Md.; Gerard, GF et al. (1989), FOCUS 11, 66) under conditions recommended by the manufacturer. A typical reaction uses 10 μg total RNA with 1.5 μg oligo(dT)₁₂₋₁₈ in a reaction volume of 60 μL. The product is treated with RNaseH and diluted to 100 μL with H₂O. For subsequent PCR amplification, 1-4 μL of this sscDNA is used in each reaction.

[0478] Degenerate oligonucleotides are synthesized on an Applied Biosystems 3948 DNA synthesizer using established phosphoramidite chemistry, precipitated with ethanol and used unpurified for PCR. These primers are derived from the sense and antisense strands of conserved motifs within the catalytic domain of several protein kinases. Degenerate nucleotide residue designations are: N=A, C, G, or T; R=A or G; Y═C or T; H=A, C or T not G; D=A, G or T not C; S═C or G; and W=A or T.

[0479] PCR reactions are performed using degenerate primers applied to multiple single-stranded cDNAs. The primers are added at a final concentration of 5 μM each to a mixture containing 10 mM Tris HCl, pH 8.3, 50 mM KCl, 1.5 mM MgCl₂, 200 μM each deoxynucleoside triphosphate, 0.001% gelatin, 1.5 U AmpliTaq DNA Polymerase (Perkin-Elmer/Cetus), and 1-4 μL cDNA. Following 3 min denaturation at 95° C., the cycling conditions are 94° C. for 30 s, 50° C. for 1 min, and 72° C. for 1 min 45 s for 35 cycles. PCR fragments migrating between 300-350 bp are isolated from 2% agarose gels using the GeneClean Kit (Bio101), and T-A cloned into the pCRII vector (Invitrogen Corp. U.S.A.) according to the manufacturer's protocol.

[0480] Colonies are selected for mini plasmid DNA-preparations using Qiagen columns and the plasmid DNA is sequenced using a cycle sequencing dye-terminator kit with AmpliTaq DNA Polymerase, FS (ABI, Foster City, Calif.). Sequencing reaction products are run on an ABI Prism 377 DNA Sequencer, and analyzed using the BLAST alignment algorithm (Altschul, S. F. et al., J. Mol. Biol. 215: 403-10).

[0481] Additional PCR strategies are employed to connect various PCR fragments or ESTs using exact or near exact oligonucleotide primers. PCR conditions are as described above except the annealing temperatures are calculated for each oligo pair using the formula:
Tm=4(G+C)+2(A+T).

[0482] Isolation of cDNA Clones:

[0483] Mammalian cDNA libraries are probed with PCR or EST fragments corresponding to kinase-related genes. Probes are ³²P-labeled by random priming and used at 2×10⁶ cpm/mL following standard techniques for library screening. Pre-hybridization (3 h) and hybridization (overnight) are conducted at 42° C. in 5×SSC, 5× Denhart's solution, 2.5% dextran sulfate, 50 mM Na₂PO₄/NaHPO₄, pH 7.0, 50% formamide with 100 mg/mL denatured salmon sperm DNA. Stringent washes are performed at 65° C. in 0.1×SSC and 0.1% SDS. DNA sequencing was carried out on both strands using a cycle sequencing dye-terminator kit with AmpliTaq DNA Polymerase, FS (ABI, Foster City, Calif.). Sequencing reaction products are run on an ABI Prism 377 DNA Sequencer.

### Example 3

### Expression Analysis of Mammalian Protein Kinases

[0484] Materials and Methods

[0485] Northern Blot Analysis

[0486] Northern blots are prepared by running 10 μg total RNA isolated from 60 mammalian tumor cell lines (such as HOP-92, EKVX, NCI-H23, NCI-H226, NCI-H322M, NCI-H460, NCI-H522, A549, HOP-62, OVCAR-3, OVCAR-4, OVCAR-5, OVCAR-8, IGROV1, SK-OV-3, SNB-19, SNB-75, U251, SF-268, SF-295, SF-539, CCRF-CEM, K-562, MOLT-4, HL-60, RPMI 8226, SR, DU-145, PC-3, HT-29, HCC-2998, HCT-116, SW620, Colo 205, HTC15, KM-12, UO-31, SN12C, A498, CaKil, RXF-393, ACHN, 786-0, TK-10, LOX IMVI, Malme-3M, SK-MEL-2, SK-MEL-5, SK-MEL-28, UACC-62, UACC-257, M14, MCF-7, MCF-7/ADR RES, Hs578T, MDA-MB-231, MDA-MB-435, MDA-N, BT-549, T47D), from mammalian adult tissues (such as thymus, lung, duodenum, colon, testis, brain, cerebellum, cortex, salivary gland, liver, pancreas, kidney, spleen, stomach, uterus, prostate, skeletal muscle, placenta, mammary gland, bladder, lymph node, adipose tissue), and 2 mammalian fetal normal tissues (fetal liver, fetal brain), on a denaturing formaldehyde 1.2% agarose gel and transferring to nylon membranes.

[0487] Filters are hybridized with random primed [α³²P]dCTP-labeled probes synthesized from the inserts of several of the kinase genes. Hybridization is performed at 42° C. overnight in 6×SSC, 0.1% SDS, 1× Denhardt's solution, 100 μg/mL denatured herring sperm DNA with 1-2×10⁶ cpm/mL of ³²P-labeled DNA probes. The filters are washed in 0.1×SSC/0.1% SDS, 65° C., and exposed on a Molecular Dynamics phosphorimager.

[0488] Quantitative PCR Analysis

[0489] RNA is isolated from a variety of normal mammalian tissues and cell lines. Single stranded cDNA is synthesized from 10 μg of each RNA as described above using the Superscript Preamplification System (GibcoBRL). These single strand templates are then used in a 25 cycle PCR reaction with primers specific to each clone. Reaction products are electrophoresed on 2% agarose gels, stained with ethidium bromide and photographed on a UV light box. The relative intensity of the STK-specific bands were estimated for each sample.

[0490] DNA Array Based Expression Analysis

[0491] Plasmid DNA array blots are prepared by loading 0.5 μg denatured plasmid for each kinase on a nylon membrane. The [γ³²P]dCTP labeled single stranded DNA probes are synthesized from the total RNA isolated from several mammalian immune tissue sources or tumor cells (such as thymus, dendrocytes, mast cells, monocytes, B cells (primary, Jurkat, RPMI8226, SR), T cells (CD8/CD4+, TH1, TH2, CEM, MOLT4), K562 (megakaryocytes). Hybridization is performed at 42° C. for 16 hours in 6×SSC, 0.1% SDS, 1× Denhardt's solution, 100 μg/mL denatured herring sperm DNA with 10⁶ cpm/mL of [γ³²P]dCTP labeled single stranded probe. The filters are washed in 0.1×SSC/0.1% SDS, 65° C., and exposed for quantitative analysis on a Molecular Dynamics phosphorimager.

### Example 4

### Protein Kinase Gene Expression

[0492] Materials and Methods

[0493] Expression Vector Construction

[0494] Expression constructs are generated for some of the mammalian cDNAs including: a) full-length clones in a pCDNA expression vector; b) a GST-fusion construct containing the catalytic domain of the novel kinase fused to the C-terminal end of a GST expression cassette; and c) a full-length clone containing a Lys to Ala (K to A) mutation at the predicted ATP binding site within the kinase domain, inserted in the pCDNA vector.

[0495] The “K to A” mutants of the kinase might function as dominant negative constructs, and will be used to elucidate the function of these novel STKs.

### Example 5

### Generation of Specific Immunoreagents to Protein Kinases

[0496] Materials and Methods

[0497] Specific immunoreagents are raised in rabbits against KLH- or MAP-conjugated synthetic peptides corresponding to isolated kinase polypeptides. C-terminal peptides were conjugated to KLH with glutaraldehyde, leaving a free C-terminus. Internal peptides were MAP-conjugated with a blocked N-terminus. Additional immunoreagents can also be generated by immunizing rabbits with the bacterially expressed GST-fusion proteins containing the cytoplasmic domains of each novel PTK or STK.

[0498] The various immune sera are first tested for reactivity and selectivity to recombinant protein, prior to testing for endogenous sources.

[0499] Western Blots

[0500] Proteins in SDS PAGE are transferred to immobilon membrane. The washing buffer is PBST (standard phosphate-buffered saline pH 7.4+0.1% Triton X-100). Blocking and antibody incubation buffer is PBST+5% milk. Antibody dilutions varied from 1:1000 to 1:2000.

### Example 6

### Recombinant Expression and Biological Assays for Protein Kinases

[0501] Materials and Methods

[0502] Transient Expression of Kinases in Mammalian Cells

[0503] The pcDNA expression plasmids (10 μg DNA/100 mm plate) containing the kinase constructs are introduced into 293 cells with lipofectamine (Gibco BRL). After 72 hours, the cells are harvested in 0.5 mL solubilization buffer (20 mM HEPES, pH 7.35, 150 mM NaCl, 10% glycerol, 1% Triton X-100, 1.5 mM MgCl₂, 1 mM EGTA, 2 mM phenylmethylsulfonyl fluoride, 1 μg/mL aprotinin). Sample aliquots are resolved by SDS polyacrylamide gel electrophoresis (PAGE) on 6% acrylamide/0.5% bis-acrylamide gels and electrophoretically transferred to nitrocellulose. Non-specific binding is blocked by preincubating blots in Blotto (phosphate buffered saline containing 5% w/v non-fat dried milk and 0.2% v/v nonidet P-40 (Sigma)), and recombinant protein was detected using the various anti-peptide or anti-GST-fusion specific antisera.

[0504] In Vitro Kinase Assays

[0505] Three days after transfection with the kinase expression constructs, a 10 cm plate of 293 cells is washed with PBS and solubilized on ice with 2 mL PBSTDS containing phosphatase inhibitors (10 mM NaHPO₄, pH 7.25, 150 mM NaCl, 1% Triton X-100, 0.5% deoxycholate, 0.1% SDS, 0.2% sodium azide, 1 mM NaF, 1 mM EGTA, 4 mM sodium orthovanadate, 1% aprotinin, 5 μg/mL leupeptin). Cell debris was removed by centrifugation (12000×g, 15 min, 4° C.) and the lysate was precleared by two successive incubations with 50 μL of a 1:1 slurry of protein A sepharose for 1 hour each. One-half mL of the cleared supernatant was reacted with 101 L of protein A purified kinase-specific antisera (generated from the GST fusion protein or antipeptide antisera) plus 50 μL of a 1:1 slurry of protein A-sepharose for 2 hr at 4° C. The beads were then washed 2 times in PBSTDS, and 2 times in HNTG (20 mM HEPES, pH 7.5/150 mM NaCl, 0,1% Triton X-100, 10% glycerol).

[0506] The immunopurified kinases on sepharose beads are resuspended in 20 μL HNTG plus 30 mM MgCl₂, 10 mM MnCl₂, and 20 μCi [α³²P]ATP (3000 Ci/mmol). The kinase reactions are run for 30 min at room temperature, and stopped by addition of HNTG supplemented with 50 mM EDTA. The samples are washed 6 times in HNTG, boiled 5 min in SDS sample buffer and analyzed by 6% SDS-PAGE followed by autoradiography. Phosphoamino acid analysis is performed by standard 2D methods on ³²P-labeled bands excised from the SDS-PAGE gel.

[0507] Similar assays are performed on bacterially expressed GST-fusion constructs of the kinases.

### Example 7

### Chromosomal Localization of Protein Kinases

[0508] Materials and Methods

[0509] Chromosomal location can identify candidate targets for a tumor amplicon or a tumor-suppressor locus. Summaries of prevalent tumor amplicons are available in the literature, and can identify tumor types to experimentally be confirmed to contain amplified copies of a kinase gene which localizes to an adjacent region. Several sources were used to find information about the chromosomal localization of each of the genes described in this patent.

[0510] Several sources were used to find information about the chromosomal localization of each of the genes described in this patent. First, the Celera Browser was used to map the genes. A second source was through BLAT searching of the Human Genome using the University of California, Santa Cruz web tools (genome.ucsc.edu/). Alternatively, the accession number of a genomic contig (identified by BLAST against NRNA) was used to query the Entrez Genome Browser (www.ncbi.nlm.nih.gov/PMGifs/Genomes/MapViewerHelp.html), and the cytogenetic localization was read from the NCBI data. References for association of the mapped sites with chromosomal amplifications found in human cancer can be found in: Knuutila, et al., Am J Pathol, 1998, 152:1107-1123. Information on mapped positions was also obtained by searching published literature (at NCBI, www.ncbi.nlm.nih.gov/entrez/query.fcgi) for documented association of the mapped position with human disease.

Results

[0511] The chromosomal regions for mapped genes are listed Table 4, and are discussed in the section Nucleic Acids above. The chromosomal positions were cross-checked with the Online Mendelian Inheritance in Man database (OMIM, www.ncbi.nlm.nih.gov/htbin-post/Omim)., which tracks genetic information for many human diseases, including cancer. References for association of the mapped sites with chromosomal abnormalities found in human cancer can be found in: Knuutila, et al., Am J Pathol, 1998, 152:1107-1123. A third source of information on mapped positions was searching published literature (at NCBI, www.ncbi.nlm.nih.gov/entrez/query.fcgi) for documented association of the mapped position with human disease.

[0512] Several sources were used to find information about the chromosomal localization of each of the genes described in this patent. First, cytogenetic map locations of these contigs were found in the title or text of their Genbank record, or by inspection through the NCBI human genome map viewer (www.ncbi.nlm.nih.gov/cgi-bin/Entrez/hum_srch?).

[0513] Alternatively, the accession number of a genomic contig (identified by BLAST against NRNA) was used to query the Entrez Genome Browser (www.ncbi.nlm.nih.gov/PMGifs/Genomes/MapViewerHelp.html), and the cytogenetic localization was read from the NCBI data. A thorough search of available literature for the cytogenetic region is also made using Medline (www.ncbi.nlm.nih.gov/PubMed/medline.html). References for association of the mapped sites with chromosomal amplifications found in human cancer can be found in: Knuutila, et al., Am J Pathol, 1998, 152:1107-1123.

[0514] Alternatively, the accession number for the nucleic acid sequence is used to query the Unigene database. The site containing the Unigene search engine is: www.ncbi.nlm.nih.gov/UniGene/Hs.Home.html. Information on map position within the Unigene database is imported from several sources, including the Online Mendelian Inheritance in Man (OMIM, www.ncbi.nlm.nih.gov/Omim/searchomim.html), The Genome Database(gdb.infobiogen.fr/gdb/simpleSearch.html), and the Whitehead Institute human physical map (carbon.wi.mit.edu:8000/cgi-bin/contig/sts_info?database=release).

[0515] Once a cytogenetic region has been identified by one of these approaches, disease association can be established by searching OMIM with the cytogenetic location. OMIM maintains a searchable catalog of cytogenetic map locations organized by disease. A thorough search of available literature for the cytogenetic region is also made using Medline (www.ncbi.nlm.nih.gov/PubMed/medline.html). As noted above, references for association of the mapped sites with chromosomal abnormalities found in human cancer can be found in: Knuutila, et al., Am J Pathol, 1998, 152:1107-1123.

### Example 8

### Detection Of Protein Protein Interaction Through Phage Display

[0516] Materials And Methods

[0517] Phage display provides a method for isolating molecular interactions based on affinity for a desired bait. cDNA fragments cloned as fusions to phage coat proteins are displayed on the surface of the phage. Phage(s) interacting with a bait are enriched by affinity purification and the insert DNA from individual clones is analyzed.

[0518] T7 Phage Display Libraries

[0519] All libraries were constructed in the T7Select1-1b vector (Novagen) according to the manufacturer's directions.

[0520] Bait Presentation

[0521] Protein domains to be used as baits are generated as C-terminal fusions to GST and expressed in E. coli. Peptides are chemically synthesized and biotinylated at the N-terminus using a long chain spacer biotin reagent.

[0522] Selection

[0523] Aliquots of refreshed libraries (10¹⁰-10¹² pfu) supplemented with PanMix and a cocktail of E. coli inhibitors (Sigma P-8465) are incubated for 1-2 hrs at room temperature with the immobilized baits. Unbound phage is extensively washed (at least 4 times) with wash buffer.

[0524] After 3-4 rounds of selection, bound phage is eluted in 100 μL of 1% SDS and plated on agarose plates to obtain single plaques.

[0525] Identification of Insert DNAs

[0526] Individual plaques are picked into 25 μL of 10 mM EDTA and the phage is disrupted by heating at 70° C. for 10 min. 2 μL of the disrupted phage are added to 50 μL PCR reaction mix. The insert DNA is amplified by 35 rounds of thermal cycling (94° C., 50 sec; 50° C., 1 min; 72° C., 1 min).

[0527] Composition of Buffer
[0528] 10×PanMix
[0529] 5% Triton X-100
[0530] 10% non-fat dry milk (Carnation)
[0531] 10 mM EGTA
[0532] 250 mM NaF
[0533] 250 μg/mL Heparin (sigma)
[0534] 250 μg/mL sheared, boiled salmon sperm DNA (sigma)
[0535] 0.05% Na azide
[0536] Prepared in PBS

[0537] Wash Buffer

PBS supplemented with:

[0538] 0.5% NP-40
[0539] 25 μg/mL heparin
[0540] PCR reaction mix
[0541] 1.0 mL 10× PCR buffer (Perkin-Elmer, with 15 mM Mg)
[0542] 0.2 mL each dNTPs (10 mM stock)
[0543] 0.1 mL T7UP primer (15 pmol/μL) GGAGCTGTCGTATTCCAGTC
[0544] 0.1 mL T7DN primer (15 pmol/μL) AACCCCTCAAGACCCGTTTAG
[0545] 0.2 mL 25 mM MgCl₂ or MgSO₄ to compensate for EDTA
[0546] Q.S. to 10 mL with distilled water
[0547] Add 1 unit of Taq polymerase per 50 μL reaction

[0548] Library: T7 Select1-H441

### Example 9

### HUV-EC-C Assay

[0549] The following protocol may also be used to measure a compound's activity against PDGF-R, FGF-R, VEGF, aFGF or Flk-1/KDR, all of which are naturally expressed by HUV-EC cells.

[0550] Day 0

[0551] Wash and trypsinize HUV-EC-C cells (human umbilical vein endothelial cells, (American Type Culture Collection; catalogue no. 1730 CRL). Wash with Dulbecco's phosphate-buffered saline (D-PBS; obtained from Gibco BRL; catalogue no. 14190-029) 2 times at about 1 ml/10 cm² of tissue culture flask. Trypsinize with 0.05% trypsin-EDTA in non-enzymatic cell dissociation solution (Sigma Chemical Company; catalogue no. C-1544). The 0.05% trypsin was made by diluting 0.25% trypsin/1 mM EDTA (Gibco; catalogue no. 25200-049) in the cell dissociation solution. Trypsinize with about 1 ml/25-30 cm² of tissue culture flask for about 5 minutes at 37° C. After cells have detached from the flask, add an equal volume of assay medium and transfer to a 50 ml sterile centrifuge tube (Fisher Scientific; catalogue no. 05-539-6).

[0552] Wash the cells with about 35 ml assay medium in the 50 ml sterile centrifuge tube by adding the assay medium, centrifuge for 10 minutes at approximately 200 g, aspirate the supernatant, and resuspend with 35 ml D-PBS. Repeat the wash two more times with D-PBS, resuspend the cells in about 1 ml assay medium/15 cm² of tissue culture flask. Assay medium consists of F12K medium (Gibco BRL; catalogue no. 21127-014)+0.5% heat-inactivated fetal bovine serum. Count the cells with a Coulter Counter™ Coulter Electronics, Inc.) and add assay medium to the cells to obtain a concentration of 0.8-1.0×10⁵ cells/ml.

[0553] Add cells to 96-well flat-bottom plates at 100 μl/well or 0.8-1.0×10⁴ cells/well; incubate ˜24 h at 37° C., 5% CO₂.

[0554] Day 1

[0555] Make up two-fold drug titrations in separate 96-well plates, generally 50 μM on down to 0 μM. Use the same assay medium as mentioned in day 0, step 2, above. Titrations are made by adding 90 μl/well of drug at 200 μM (4× the final well concentration) to the top well of a particular plate column. Since the stock drug concentration is usually 20 mM in DMSO, the 200 μM drug concentration contains 2% DMSO.

[0556] Therefore, diluent made up to 2% DMSO in assay medium (F12K+0.5% fetal bovine serum) is used as diluent for the drug titrations in order to dilute the drug but keep the DMSO concentration constant. Add this diluent to the remaining wells in the column at 60 μl/well. Take 60 μl from the 120 μl of 200 μM drug dilution in the top well of the column and mix with the 60 μl in the second well of the column. Take 60 μl from this well and mix with the 60 μl in the third well of the column, and so on until two-fold titrations are completed. When the next-to-the-last well is mixed, take 60 μl of the 120 μl in this well and discard it. Leave the last well with 60 μl of DMSO/media diluent as a non-drug-containing control. Make 9 columns of titrated drug, enough for triplicate wells each for 1) VEGF (obtained from Pepro Tech Inc., catalogue no. 100-200, 2) endothelial cell growth factor (ECGF) (also known as acidic fibroblast growth factor, or aFGF) (obtained from Boehringer Mannheim Biochemica, catalogue no. 1439 600); or, 3) human PDGF B/B (1276-956, Boehringer Mannheim, Germany) and assay media control. ECGF comes as a preparation with sodium heparin.

[0557] Transfer 50 μl/well of the drug dilutions to the 96-well assay plates containing the 0.8-1.0×10⁴ cells/100 μl/well of the HUV-EC-C cells from day 0 and incubate ˜2 h at 37° C., 5%. CO₂.

[0558] In triplicate, add 50 μl/well of 80 μg/ml VEGF, 20 ng/ml ECGF, or media control to each drug condition. As with the drugs, the growth factor concentrations are 4× the desired final concentration. Use the assay media from day 0, step 2, to make the concentrations of growth factors. Incubate approximately 24 hours at 37° C., 5% CO₂. Each well will have 50 μl drug dilution, 50 μl growth factor or media, and 100 μl cells, =200 μl/well total. Thus the 4× concentrations of drugs and growth factors become 1× once everything has been added to the wells.

[0559] Day 2

[0560] Add ³H-thymidine (Amersham; catalogue no. TRK-686) at 1 μCi/well (10 μl/well of 100 μCi/ml solution made up in RPMI media+10% heat-inactivated fetal bovine serum) and incubate ˜24 h at 37° C., 5% CO₂. Note: ³H-thymidine is made up in RPMI media because all of the other applications for which we use the ³H-thymidine involve experiments done in RPMI. The media difference at this step is probably not significant. RPMI was obtained from Gibco BRL, catalogue no. 11875-051.

[0561] Day 3

[0562] Freeze plates overnight at −20° C.

[0563] Day 4

[0564] Thaw plates and harvest with a 96-well plate harvester (Tomtec Harvester 96^{(R)}) onto filter mats (Wallac; catalogue no. 1205-401); read counts on a Wallac Betaplate™ liquid scintillation counter.

[0565] One skilled in the art would readily appreciate that the present invention is well adapted to carry out the objects and obtain the ends and advantages mentioned, as well as those inherent therein. The molecular complexes and the methods, procedures, treatments, molecules, specific compounds described herein are presently representative of preferred embodiments, are exemplary, and are not intended as limitations on the scope of the invention. It will be readily apparent to one skilled in the art that varying substitutions and modifications may be made to the invention disclosed herein without departing from the scope and spirit of the invention.

[0566] All patents and publications mentioned in the specification are indicative of the levels of those skilled in the art to which the invention pertains. All patents and publications are herein incorporated by reference to the same extent as if each individual publication was specifically and individually indicated to be incorporated by reference.

[0567] The invention illustratively described herein suitably may be practiced in the absence of any element or elements, limitation or limitations that are not specifically disclosed herein. Thus, for example, in each instance herein any of the terms “comprising,” “consisting essentially of” and “consisting of” may be replaced with either of the other two terms. The terms and expressions which have been employed are used as terms of description and not of limitation, and there is no intention that in the use of such terms and expressions of excluding any equivalents of the features shown and described or portions thereof, but it is recognized that various modifications are possible within the scope of the invention claimed. Thus, it should be understood that although the present invention has been specifically disclosed by preferred embodiments and optional features, modification and variation of the concepts herein disclosed may be resorted to by those skilled in the art, and that such modifications and variations are considered to be within the scope of this invention as defined by the appended claims.

[0568] In addition, where features or aspects of the invention are described in terms of Markush groups, those skilled in the art will recognize that the invention is also thereby described in terms of any individual member or subgroup of members of the Markush group. For example, if X is described as selected from the group consisting of bromine, chlorine, and iodine, claims for X being bromine and claims for X being bromine and chlorine are fully described.

[0569] In view of the degeneracy of the genetic code, other combinations of nucleic acids also encode the claimed peptides and proteins of the invention. For example, all four nucleic acid sequences GCT, GCC, GCA, and GCG encode the amino acid alanine. Therefore, if for an amino acid there exists an average of three codons, a polypeptide of 100 amino acids in length will, on average, be encoded by 3100, or 5×1047, nucleic acid sequences. Thus, a nucleic acid sequence can be modified to form a second nucleic acid sequence, encoding the same polypeptide as encoded by the first nucleic acid sequences, using routine procedures and without undue experimentation. Thus, all possible nucleic acids that encode the claimed peptides and proteins are also fully described herein, as if all were written out in full taking into account the codon usage, especially that preferred in humans. Furthermore, changes in the amino acid sequences of polypeptides, or in the corresponding nucleic acid sequence encoding such polypeptide, may be designed or selected to take place in an area of the sequence where the significant activity of the polypeptide remains unchanged. For example, an amino acid change may take place within a β-turn, away from the active site of the polypeptide. Also changes such as deletions (e.g. removal of a segment of the polypeptide, or in the corresponding nucleic acid sequence encoding such polypeptide, which does not affect the active site) and additions (e.g. addition of more amino acids to the polypeptide sequence without affecting the function of the active site, such as the formation of GST-fusion proteins, or additions in the corresponding nucleic acid sequence encoding such polypeptide without affecting the function of the active site) are also within the scope of the present invention. Such changes to the polypeptides can be performed by those with ordinary skill in the art using routine procedures and without undue experimentation. Thus, all possible nucleic and/or amino acid sequences that can readily be determined not to affect a significant activity of the peptide or protein of the invention are also fully described herein.

[0570] The invention has been described broadly and generically herein. Each of the narrower species and subgeneric groupings falling within the generic disclosure also form part of the invention. This includes the generic description of the invention with a proviso or negative limitation removing any subject matter from the genus, regardless of whether or not the excised material is specifically recited herein.

The application's sequence listing, which the Patent Office published only in electronic form, follows.

SEQUENCE LISTING (239 sequences)

SEQ ID NO: 1 - DNA, 5308 bp, Mus musculus
ccttcaccttcagccgcggctcccattggccggcgcgcacctgcccgtccgtcgggggcgggcttggagggcggggcgggcgaccaggtgaaggagcgcgggtggcgaccgaggaaggtgacagcggggagggcgggagggaggggggaagccgcgcagaacgagccacgggaccacagacggaccgccgggcggacggacggacggggcatgcgggcggtctggctctagcccgggtttcggggctccagcggtagccatggagcagcggctgcgtgcgctggagcagctggtacggggcgaagctggtggcagcccagggctcgacggcctcctggatctgctgctgggggtgcaccaagagctcagcagcgcccccctgcgccgggagcgtaacgtggcgcagtttctgagctgggccagcccctttgtaacaaaagtgaaagagctgcgtctacagagagatgactttgagatcttgaaggtgattggcagaggggcctttggggaggttgccgtggtgaggcagaggggcagtggccagatctttgccatgaagatgctgcataagtgggagatgctgaagagggctgagacggcctgtttccgggaggagcgagatgttctagtgaagggagacagccgctgggtgactgctctgcactacgccttccaggatgaagagtacctgtacctggtgatggactactatgctggcggggaccttctcacgctgctgagccgctttgaggaccgcctcccacctgagctggcccagttctatctggctgagatggttctggccatccactcactgcaccagctgggctatgtccacagggatgtgaagcctgacaacatcctgctggacatgaatggccacatccgcctggcagactttggctcctgcctgcgtctcaacaacaatggcatggtggattcatcagtcgcagttgggaccccggactacatctctcctgagatcctacaggccatggaggaaggcaagggccactacggcccacagtgtgactggtggtcactgggagtctgcgcctatgagctgctctttggggaaacacccttttatgcagaatctctggtagaaacctacggcaagatcatgaaccacgaggaccacctccagttccctgctgatgtgactgatgtgcctgctagtgcccaggacctgatccgacagctgctgtgccgtcaggaggagcggctgggccgtggtgggctggacgacttccggaagcaccccttctttgaaggggtcgattgggagaggcttgcaaccagcacagcgccatacatccctgagcttcgagggccgatggacacctccaacttcgacgtggatgatgataccctcaaccgtccagagacgctgccaccatcctcccatggtgccttctcaggccaccacctgccatttgttggcttcacttacacctcaggcagcccctttgatgtgcagagctcagagctaatggctgccccagaggggacgccccactgtgtggagcaggtgaaagtggagctcagccacaagtgtcaagagcccctgcatggcccattacagccccaggagcttgtgcggcttcagaaggaagtacaggttcttcaggagaaactggcagagacactgagggacagcaaggcctccctctcacaaactgatggcctccatgctagaagcccagccccaaacatccaactacaacaggagaaggaccgcctccagcaggagctgactgaagctcaggcagcattgcgagtgcaggatgctgagctgtgccaagcgcagaaccggcaggaagaattcctgcagaggctgtgggaagcccaggagagagaggcagctgcagccagccagatccaggccctgaactcccagctggaggaagcctgggttgtccggagagagctcgaaggccaggtgaccaccctgagtcaggaggtgacacggctccagggacaatgtaaacaagaatcttcacaggccaagaccgtccatgcagcccctgagacgaacggcataggatctcctgagggtcagtctcaagaggcccagctgaggaaggaagtggcggctctgagggagcagctggagcatgcctgcagccaagggatcagtgttgggaaagaggaggttctgtgccgattgcaggaggaaaaccagcggctgagccgggagcaggaacggctggcaggagagctggaactggagctacagagcaagcagcgtttggagggtgaacggcgggagactgagagcaactgggaggctcagatcgctgacatcctcagctgggtgaatgacgagaaggtctcaagaggctacctgcaggccttggctactaagatggctgaggagctggagtccttgaggaatgtgggcacgcagacactccctacccggcctctgaagatggaggcctcagcccggctagagcttcagtcagcactggaagctgagatccgtgccaagcagagtctgcaggagcagctgacgcaggtgcaggaggctcagcggcaggctgaacgccgcctgcaggaggctgagaagcaaagtcaggccctgcagcaggaggtggctgagctccgggaggaactgcaagctcgaggaccgggggatgccaggccttccacttccctcatccctctcctgtccttctggaacacagagaaggattctgccaaggaccctggcaattcaggagagggtccaaggtctggagccgaagcagagctgaggccagagggccgccgcagtctgcgcatggggagtgtgttccccagggtgcccgcagccaccaccacccctgccgaaggtcctcctgctaagggtactggggggcgctggggcatgttgacagtgtgtactccttcacagcccggctcacacaccctgcgtccccggagttttccatcccctaccaagtgtctccgctgcacctcgctgatgctgggcctgggccgccagggcctgggctgtgacacctgtggctacttctgtcactcagcttgtgcgtcacaagccccaccttgccctgtgccccctgaactcctccgcacagccttgggggtgcaccccgaaacaggcacagggactgcctatgagggcttcctgtcggtgccgcggccctcaggtgtccgtcggggctggcagcgggtgtacgccgctctcagtgactcccgcctgttgttgtttgatgctcctgaccctcgaggcagcctggccagtggggtcctcctgcaggccttggatctaagggacccccagttctcagccacccctgtcttggccccagatgtcattcatgcccaatccaaggacctgccacgtatcttcagggtgacagcctcccagctgacagtgccaccaaccacatgcactgtgctgctgctggcagagaatgagggggagcgggagcgctggcttcaggtgctgggggagctgcagcggctgctactggatgcacgtccaaggccccgaccggtgtacacactcaaggaggcctatgacaatgggctgccactgctgcctcatgcgctctgtgctgctgtcattgaccaagagcgtcttgccctgggcactgaggaggggttgtttgtgatccatcttcacagcaatgacatcttccaggtgggagactgccgccgggtgcagcggttggctgtgagctctgcggctggcctcctggctgtgctctgtggccgtggccccagtgtgcgcctcttcgccctggacgaactggagagtgctgaggtggcgggtgccaagatcccggaatcccgaggctgtcaggctttggtcgctgggcgcatcttgcaggcccggactccagtgctctgtgtggcagtcaaacgccaagttctctgttaccagctgggcccaggaccagggccctggcagcgccgcatccgagagctgcaagcaccagctccggtgcagagcctgggcttgctgggtgatcggctctgtgtgggcgccgcaggcaccttcgctctctacccgctgctcaatgaggctgcacccttagcgctgggaactggtctggtggccgaggagctgcctgcatcccgtgggggcctaggtgaggcactgggtgccgtggagctcagcctcagcgagctcctgctgctcttcgccactgccggcgtctacgtggatagtgctggccgcaagtcacgaagccacgagctgctgtggccagctgcacccactggctggggttacacagcaccctacctaacagtgttcagtgaaaacgcccttgatgtgtttgacgtgaggagagcagaatgggtacagactgtgccgctcaagaaggtgagacccctgaatccagaaggctccttgttcctttatggcaccgagaaggtccgcctgacctacctcaggaatccattggcagagaaggacgagtttgacattcccgacctcacggacaacagccggcgccagctgttccgcaccaagagcaagcgccgtttcttcttccgggtgtctgatgagctgcgacagcagcagcgcagggagatgctgaaggacccttttgtgcgatccaagttcatctcgccgcccaccaacttcaaccacctggtgcacgtgggccctacggagggaaggcccaacaccagggatgggacccgggctcaggaacagaagagcagaggtgcccgcagctccgggccgcagcggccccacagcttctcagaggcatttcggcggccagtgtccacgggcagtgatggtctccctggagaaacagacccattgaagaggaaaccttggacatctctgtccagcgaatcagtgtcctgcccccaggggtccctgagccctgcagcatccctgatacaggtctcagaacggccccgaagtctccctccagatcctgagtcagagagctccccctgatgccctctggcagtgcccaccccattcccaagacagaaggaatgaggaagcaaagagcttataggatgccatactccggctggtccgggatgtgctgaaattcagactcagggagagcctgggtggaggggtaagagcacggcacgcctgggtccccaggaatagaggtctgactccttgccccattcctgctattcccttgggcttccaacacgggcctacatgggcctctaggagtgccgtggctctggtgcccagggaagattgtgccaaagttgtgcttcacagggccagtcccagggaagctgttaggagtcaggatgaggaatggaggggcaggtccttgcgagtatgctggtgtcttgtctgtgcagcctg

SEQ ID NO: 2 - DNA, 5475 bp, Mus musculus
cggccgccgggccggggagtgctggctctgacgccggggcgcacggacggagagaggccggcgcgtggggagcgggccgcgcggcaccatgtcggccaaggtgcggctcaagaagctggagcagctgctcctggacgggccgtggcgcaacgatagcgccctgagcgtggagacgctgctggacgtgctggtgtgcctttacaccgagtgcagccactcggcgctgcgccgcgacaagtatgtggcggagttcctcgagtgggccaagcctttcacccagctcgtgaaggacatgcagcttcatcgagaagacttcgagatcatcaaagtgatcgggagaggagcctttggtgaggttgctgttgtcaaaatgaagaacactgaacgaatttatgcaatgaaaattctcaacaaatgggaaatgctaaagagagcagagacagcttgctttcgagaagagcgtgacgtgctggtgaacggcgactgccagtggatcacggctctgcactatgcctttcaggatgagaactacctgtacttggtcatggattactatgtaggtggtgatctgctgaccctgctgagtaagtttgaagacaagcttccggaagacatggcgaggttctacattggcgagatggtgttggccattgactcgatccaccagctccactatgtgcacagagacatcaagcccgacaacgtccttctagatgtgaacggtcacatccgcctggctgactttggctcgtgcttgaagatgaacgatgatggcactgttcagtcttccgtggccgtgggcacacctgactacatctcaccagagatcctgcaggccatggaggatggcatgggcaaatacgggcccgagtgtgactggtggtcgctgggcgtctgcatgtatgagatgctatacggagaaaccccgttctacgcagagtctctggtggagacatacgggaagatcatgaaccacgaggagcggtttcagttcccatcccatgtcaccgatgtctctgaagaagcaaaagaccttatccagagactaatatgcagcagagagcgccgacttgggcagaatggaatagaagactttaagaaacacgcattctttgaaggtctgaattgggagaatatacgaaaccttgaagcgccctacattcccgatgtgagcagcccttcggacacgtccaacttcgatgtggacgacgacatgctgagaaacattgaaatcttacctcccggctctcacacgggcttctcgggactgcatttgcccttcatcggtttcacattcacgacggaaagctgcttttctgaccggggctctctgaagagcatgactcagtctaacacgctaaccaaagacgaagatgtgcagcgggacttggagaacagcttgcagatcgaagcgtacgagcgaaggatacggaggctggagcaggagaagctggagctcagccggaagctgcaagaatccacccagactgtgcagtcccttcacggttccacacgggccctgggcaactcaaaccgcgacaaggaaatcaagaggctgaatgaagagcttgaacgcatgaagagtaaaatggcagattcaaacaggctcgaacgccagctggaggacacagtgacacttcgccaggagcatgaggactccacacaccggctgaagggcctcgagaagcagtaccgcctggcccggcaggagaaggaagaattgcacaagcaattggttgaggcttcagagcgattgaaatcccagaccaaagaacttaaagacgcgcatcagcagcgaaaacgggccctgcaggagttctcagagctcaatgagcgcatgtcggagctcaggtcgctgaagcagaaggtgtcccgtcagctccgggacaaggaggaggagatggaggtggccatgcagaagatcgactccatgcggcaggacctccgcaagtctgagaagtccaggaaagagctggaagctcggcttgaggacgcagctgccgaggcctctaaggagcggaagctccgagaacacagcgagagcttctgtaagcagatggagcgcgagctcgaggccctcaaggtaaagcaaggaggccgggggccaggggccgcgtcggaacatcagcaggagatctccaaaatcaggtcggagctcgagaagaaagtcttgttctacgaggaggagctggtgcgccgagaggcctcccacgtgctagaagtaaagaacgtgaagaaggaagtccacgactccgaaagccaccagttggccctgcagaaagaggtcctgatgctgaaagacaagttagaaaagtcaaagcgagaacggcacagtgagatggaggaggccataggcaccgtgaaggacaagtacgaacgggagagggccatgctgttcgatgagaacaagaagttaacagcagaaaacgaaaagctttgttcctttgtggataaactaacagcccaaaacagacagctggaagatgagctgcaggatctggcatccaagaaggagtcagttgcgcactgggaggcgcagatcgcagagatcattcagtgggtcagcgatgagaaagatgccagaggctaccttcaagcccttgcttctaagatgaccgaagagcttgagaccttgcgaagttctagtttgggatccaggacactggatccactctggaaagttcgtcggagtcagaagctggacatgtctgcacggctggaattgcagtctgctcttgaggccgagatccgtgccaaacagctcgttcaggaggagctgaggaaggtcaaagacagcagcctggccttcgaaagcaaactgaaggaatcggaagcgaaaaacagggaattgttagaagaaatgcaaagtctgaggaagaggatggaagagaagtttagagcggatacagggctcaaacttccagatttccaggattctatctttgagtatttcaacactgctcctcttgcacatgatctgacttttagaaccagctcagctagtgaccaggaaacacaggcttcaaagatggacttgtccccatcagtgtctgtagccacgagcacagagcagcaggaggatatggctcggccacagcagaggccgtctcctgtgccactgcccagcacgcaggccctcgccatggctggaccgaagcccaaagcccaccagttcagcatcaagtccttccctagccccacccagtgcagccactgcacgtccttgatggtcggactgatccgacagggctacgcctgtgaggtctgtgcattttcctgccatgtgtcctgcaaagacagcgctccccaggtgtgccccatacctcctgagcagtccaagaggcctcttggcgtagacgtgcagaggggcataggcacggcctacaagggctacgtcaaggtcccaaagcccacaggcgtgaagaaaggatggcagagggcttacgccgtggtctgtgactgcaaactcttcctgtacgacctgccagaagggaagtcgacccagcccggtgtcgttgccagtcaagtcttggacctcagagatgaggagtttgctgtgagttcagtcctggcctcagatgttatccatgctacacgccgagacattccgtgcatattcagggtgacggcctctctcttaggttcgccttctaagaccagctcactgctcatcctgacggagaacgagaatgaaaagaggaagtgggtagggatccttgaagggctgcaggccatcttgcataagaaccggctgaagagccaggtagtgcacgtcgcacaggaggcctacgacagctcgctgccgctcatcaaggccgtcctggctgctgctatcgtggatggagacaggattgcggtcggcctggaagaagggctctacgtcattgagctcacccgagacgtgatcgtccgcgctgctgactgcaagaaggtgtaccagatcgagctggcgcccaaggagaagatcgccatcctcctgtgtggccggaaccaccatgtgcacctctacccctggtcctccttcgacggagcagaagcgagcaactttgacatcaagctcccggaaacaaagggctgccagctcatagcgacagggacgctgaggaagagctcgtccacctgcctgtttgtcgctgtgaagcgactaatcctttgctacgagatccagagaactaagcctttccacaggaagttcagtgagctggtggctccgggacacgtgcagtggatggccgtgttcaaggacaggctctgtgttggctacccctctgggttctctctgttgagcatccagggggacgggccgcctctcgacctggtaaatcccactgacccctcgctcgcgttcctctcacagcagtctttcgatgccctctgtgctgtggagctcaaaagtgaggagtacctgctttgcttcagccacatgggactgtacgtggaccctcaaggtcggaggtcacgcatgcaggagctcatgtggcctgcggctcctgtcgcctgtagttgcagccccacccatgtcacagtgtacagcgaatacggggtggatgtcttcgacgtgcgcaccatggagtgggttcagaccatcggcctgcggaggataagacctctgaactctgatggcagcctcaacctgctgggctgtgagccccctcgcctcatctacttcaaaaacaagttctcaggaacaatcctcaatgtgcccgacacctcggacaacagcaagaagcagatgctgaggacacggagcaaacgacgttttgtcttcaaggttcccgaggaagagcggctacagcagcggcgagagatgctcagagaccccgaactgcgatccaaaatgatatccaacccaaccaacttcaaccacgtggctcacatgggtcctggggatggcatgcaggtgctcatggacctgcctctgagtgctgcacccactgtccaggaggagaagcagggccctaccccagcaggcctcccccggcagccgccatccaggagcaagccctatgtctcgtggccgtcgtcaggtgggtccgagcctggagtgcctgtgcctctgaggagcatgtccgaccccgaccaggattttgacaaagagcctgactctgattccaccaaacactcaactccatccaatagctccaaccctagcggccccccaagccccaactcgccccatcggagccagctccctatggaaggcctggaccagccatcctgtgacgcctgaggcctccagcatagcaccgtggggccagggagcccgaatggccccagcatcagtgccaaggctgagctgacgactctccagtgttgtccaaggaaatgtagaatcagtttgtagatagataaaataatctttattataatgaccagttttgtgccacattgtcggtggcgatcgaccagatgtgttcgtctgcacagccgcgaggcaacactgttccgtttgcacatgaaggaccaccagtcacc

SEQ ID NO: 3 - DNA, 4149 bp, Mus musculus
ccagcgcgtctgctcgcgcccggtgccaccgggcgtcggttccttcggcgccgccatgaagtcccgcagggagaaattactgatccccgcgctgacgctcgatctgtcgcccagcagccagagcccatgcctgttgagccccggcagcccgtgcagcccgtgcagcccatcgctgggcctgcaaccctggagctgccgcagtggcaaccgtaagagcttggtcgtggggacgccctcacccactctctccagacctctgtcaccactctctgtcccaactgcaggtaacagccccctggacagtcctcggaacttctctgctgcagcagccatcagtttcccctttgcccggagggctgacggcagaagatggtcacttgcttccctcccgtcctcgggctatgggaccaacactcccagctccactgtatcgtcaagctcgtcctcccgggagcgtctacaccagctccccttccagcccacagcagacgagctgcgcttcctgtccaagcacttccgcagctcagagagtgtggtggacgaggacggaggccgttctccacgcctgcgcccacgctcacgcagcctcagccctggacgcacatcaggaaccttcgacaacgaaatagtgatgatgaaccacgtgtaccgggagcgtttccccaaggccacggcgcagatggagggccggctgcaggacttcctggcagcatttgctcctggcgaccgcctggcactggcagacggtgtcttgggctttatccaccaccagatcgtggaactggcacgggactgcctggccaagtcgggcgaggctctggtcacttcccgctatttcctggagatgcaggacaagctggagaggctgttgcaggatgctcacgagcggtcggacagcgccgaggtgggcttcatagtgcagctggtccgaaagctgctcatcatcatctccaggccagcgcggctgctcgagtgcttggagtttgacccggaagaattctaccatctgctggaggctgcagaaggccaggcccgcgaggaccagggcgtgaagactgatctgccccgctacatcatccgccagctgggccttgccaaggacccgctggaagagatccagcccctgaatgaccttgatgaaagccagccccctgctcctggatcccctgagagccgaggcctgggtggtccgtctcggaggaagccatgtgagagcgactttgagaccatcaagctcattagcaatggagcctatggggccgtctacctggtgcgccacagggatacgcggcagcgcttcgccatcaagaaaatcaacaaccagaatttaattctgcgcaaccagatccaacaggtgtttgtggagcgagacatcctcaccttcgccgagaacccctttgtggttggcatgttctgctcctttgagacccgccgccctctctgtatggtcatggaatatgtggaagggggtgactgcgctacgctcctgaaaaacatgggcccactgcccgtggacatggcacgcatgtacttcgcggagacggtgctggcactggaatatctgcacaactatggcattgtgcaccgagatctcaaacctgacaacctgctcatcacctccctcggccatatcaagctgacggacttcggcctgtccaagatcggcctcatgagcatggccaccaacctgtatgaaggtcacatcgagaaggatgctcgagagtttgtggacaagcaggtgtgtgggacacccgagtacatcgcaccagaggtgatcttccgccagggctacgggaagccagtagactggtgggccatgggcgtcatcctgtatgagttcctggtgggctgtgtgccattcttcggggacacgcctgaggagctgttcggacaggttgtcagtgatgagatcatgtggccagagggagatgaggcccttccccttgacgctcaggacctgattactaggcttctgcgtcagagcccaatggacaggctggggactggtggcacccatgaggtgaaacagcaccccttcttcctggccctggactgggcagggctcctgagacacaaggcagagtttgtcccacagcttgaagctgaggatgacaccagctactttgacactcgctctgagcggtaccgccacttgggctccgaggacgacgagacgaatgatgaggagtcctccacggagatcccccagttctcctcctgttcccaccgcttcagcaaggtttacagcagctctgagttcctggccgtccagcccaccccaacctttgctgaaaggagcttcagtgaggaccgagaagacggctgggggcaaagcctcggggaccgtggccgccggctgagcgctgacctccggctaaggtcctggacacctgcctcttcctgtcagccatcttcctgtcagactgaccggggtcctagcccgtctctcctaagcactatcagtttggatgtgatgcctaaatttgccttctcctctgaagatgagggagcaagttcaggacctgctgatccccaaaagcctgtcttcattctgggggagcctgatcccccacccccgaccaccccagtgacacccaagccctgcaacctttctgctgacacagctgtcctcagccatgcccgccttcgaagtaacagtacaggagcccggcactccactcctcggcccctggatgctggcagaggccgccgcctaggaggctcaagagatcctggccctgagaagccccgggcctcccctggtggcagtgggggtcgagtgcccaagtcagcctctgtgtctgccctgtccctcatcatcacggcagacgacggcagcgggggccctctcatgagccccttgtcgccccgctcgctgtcctccaatccctcctcccgagactcctcacccagccgggacccatcaccagtgtgtggtagcctgcggcctcccatcgtcatccacagctcaggcaaaaagtatggcttcagcctgcgcgccattcgtgtctacatgggtgatagtgacgtgtacacggtgcaccatgtggtctggagcgtggaggaggggagccctgcacaggaggcaggactgcgtgctggggacctcatcacacacatcaatggggagtcagtcctgggcctggtacacatggacgtggtggagctgctgctgaagagtggcaacaagatctccctgcgcaccacggccctggagaacacctccatcaaggtgggacccgcgcggaagaacgtggccaagggccgcatggcccgtaggagtaagcgcagccgccggcgtgagacccaggaccggcggaagtctctgtttaagaggatctcaaagccatcttctgtgctccacaccagccgtagcttttcctcaggcctccagcactctctgtcctccagcgagagcctccccggatcacccactcacagcctgtctcccagccccaccacgccctgccgcagccctgcccccgacgcccccacagacacagcatccccacccaatgtgtccccaagctccagcagccccgcttctccagccactggtcacacccgtcccagctccctgcatggcctggcagccaagctcggaccacctcgtcacaagagcggtcgccgcaagtccacaagcagtatccctccatctccgctggcctgcccgcccgtgcccacgcccccgccacgctcaccatccccccttccggggcacatccccatacccgcccggtctcctaggctgcgtaggggccagtcagccgacaagctgggcctaggcaccagtgagaggctggatggggatggaggccggcgcgcccggggggccgaggctgagctggtcgtcatgaggaggctgcatctatcagagcgtcgggattccttcaagaagcaggaggcagtgcaggaggtgagcttcgatgaggagcctgggccgcctcgcggggtgccgaagatcgctgtgcagggtgcagaggccacacctggaaccccaggacatgccaggaaagactgaccacctctggctgcagttccttatgcagctatcatcttcaccaagtcacacctagatggggtgcagctatcagcctgggactcggccgagggtgcccccttcccaggaagggctgggatgggggtgcc

SEQ ID NO: 4 - DNA, 4869 bp, Mus musculus
tgccgctgcctctgctgctgctgccgccgcacctgccaccatgtcgccgccgccgggtcatgtctgactctctctggaccgcgctttccaatttctcgatgccctccttccccggcggcagcatgtttcgccgcaccaagagttgccgtaccagcaaccggaaaagcctcatcctgacaagcacttctccgactctaccgcgaccccactccccgctgccgggccacttaggtagcagtcctttggacagcccccgcaacttctctcccaacactcccgcccacttctcgtttgcttcttcccgaagggcggatggacgccgatggtcgcttgcttcgctcccttcctctggctatggcaccaacacgcccagctcaactgtttcatcctcctgctcctcccaggagcgcctgcatcaactaccgtaccagcccaccgtggacgagctgcactttctgtccaaacacttcggcagcaccgagagcatcaccgacgaggatggtggccgccgctctcccgccgtgcgtcctcgctctcgcagcctcagccccggccgctccccctcctcctacgacaacgaaattgtgatgatgaaccatgtgtacaaggagcggttcccaaaggccactgcacagatggaagagaagctgcgggacttcgcccgcgcctatgaacctgacagcgtgctgccgctggccgacggcgtgctcagcttcatccaccatcagatcattgaactggcccgagactgccttaccaagtcccgcgatgggctcatcaccacggtctatttctatgaactgcaggaaaacctagagaagctgctgcaggacgcttatgaacgctcggagagcttggaggtagcctttgtcactcagctggtgaagaaacttctcataatcatctctcgccctgcaaggcttctggagtgcctggaattcaacccagaagagttctaccaccttctggaggcagccgagggacatgccaaggagggccacctggtcaaaactgacatcccccgatacatcatccgacagctgggcctcactcgggacccctttccagatgtggtgcgcctggaggagcaggacagcgggggctccaacactccggagcaagacgacacatctgagggtcgcagcagcacctccaaggccaagaaacctcccggtgaaagtgactttgacactatcaagctcattagcaatggtgcctacggagccgtctacctggtgcggcaccgggacacgaggcagcgcttcgccatgaagaagatcaacaaacagaacctgatcctgcgcaaccagatccagcaggcgtttgtggagcgcgacatcctcacgtttgcagagaacccatttgtggtcggcatgttctgctcctttgagacccggcgccacctttgcatggtcatggagtatgtggaaggtggtgactgtgccactctcctcaagaacattggggcactgcctgtggagatggcgcgaatgtattttgcagaaacagttctagcccttgagtacttacacaattatggcatcgtgcaccgtgacctcaagccagacaacctcctcattacttccatgggccacatcaagctcacggattttggcctctccaagatgggactcatgagcctgaccaccaacttatatgaggggcacattgagaaggatgcccgggagttcctggacaaacaggtgtgtgggaccccagagtacatcgcacccgaggtcatcctgcgccagggctacggcaagccagtggactggtgggctatggggatcattctctacgagttcctggtgggctgtgtgcctttcttcggggataccccagaagagctctttggacaggtcatcagcgatgacatactgtggcctgaaggggacgaggccctgcccacagatgcacagcttctaatatctagcctcttgcagaccaaccccctggtccggcttggggcaggtggtgcttttgaggtgaagcagcatagtttcttccgagacctggactggacagggctactgcggcagaaggcggagttcatcccccacctagagtcagaagatgacaccagctactttgacacccgctccgacaggtatcaccatgtgaactcctatgatgaggacgacaccaccgaagaggagcccgtggagatccgccaattctcctcctgctcgccgcgcttcagcaaggtgtacagcagtatggagcagctgtctcagcacgagcctaagacccccgtctcagcatctggggccagcaagcgggacccaagcgctaagggcccggaggagaaagtggccggcaagagggagggactgggtggcctgactctgcgtgagaagacctggagagggggctctccagagattaagcgcttctcagcgtctgaagccagttttctggaaggagaggccagtcccccgctgggagcgcgcagacgtttctcagcactgctggagcccagccgcttcactgcccctcaagaggatgaagatgaggctcgactccgcagacctcctcgacccagctccgatccccctagctcactggacacacgcgtccccaaagaggcagttcaaggagagggcacgtccacccccggggaacccgaggccactgagcgctcacatccaggtgacctcggcccaccctccaaggatggagacccatcaggccctagggccaccaacgacctggttttgcgaagggcaaggcaccagcagctgtctggggatcttgctgtggagaagcgaccgtctcgaactgggggcaaagttatcaagtcggcttcagctacagccttgtcagtcatgattcctgcagtggacccacatggaggctcacccctggctagtcccatgtcccctcgatctctctcctccaatccatcctcacgggactcttcgcctagccgagactactcaccagctgtcagtggactccgttcccccatcaccatccaacgctcaggcaagaaatatgggttcacactgcgagccatccgtgtctacatgggcgactccgatgtctacagtgtccaccacattgtttggcacgtggaggaaggaggcccagcccaagaggcagggctctgtgctggggacctcatcactcacgtgaatggtgagcccgtgcatggtatggtgcatcctgaggtggtagagctgatcctgaagagtggcaacaaagtagctgtgaccaccacaccctttgaaaacacttccatccggattgggcctgccaggcgcagcagttacaaagccaaaatggcccgaaggaacaaaaggccttcggccaaagacggccaggagagcaagaagcggagctctctctttcggaagatcacaaagcagtcgaacctgctgcacaccagtcgatcgctgtcctctttgaaccggtccttgtcgtccagcgacagtcttccgggctcgcccacgcacggactacccgcacgctcgcccacacatagctatcgctctacacctgactccgcctacctaggcgcctcgtcacagagtagctcgccagcttccagcacgcctaattcccccgcctcatccgcctcgcaccacatcaggcccagcaccttgcacgggctgtcaccgaaactacaccgccagtaccgctcagcgcgctgtaaatcggctggcaacatcccgctgtcacctctagcgcacacaccatccccgacgcaggcgtcgccgccgccgctgccaggccacacggtgggcagctcacataccacgcagagcttccctgccaaactacactcatcgccacctgtcgtgcgccggcgccccaaaagtgcagagccaccacgctcgccgttgctcaagcgcgtgcagtcagcggagaaactaggggcttcgctgggagcagacaagaagggcgcactgcgcaaacacagcctggaagtgggacaccctgatttccgaaaggacttccatggtgagctggccctgcatagcctcgctgagtctgatggtgagacgcctcctattgagggtcctggggcgacccggcaggtcgccgtgcgacgcctgggtcgccaggaatcacccctaagcttgggcgcggacccgttgctacccgatggtgtccagagacctatggcgtcaagcaaggaggattccgcgggaggtacagaggcttgcaccccacctcgcgcgacaacccctgggagccggaccctggagcgtgactcgggttgcacaaggcaccagagcgtgcagactgaggatggcccaggtggggtggccagggccctggccaaggcagcgctaagtccagtgcaggaacatgagacaggccggcgcagtagctctggtgaggcaggcacacccccggtgcccattgttgtagagcctgctcggccaggggtcaagacccaggcaccccagcctctgggcacagactccaagggattgaaggaacctgtagcccagatgcctctgatgcctgatgccccaaggggcagggagcgctgggtgctagaggaggtggaagagcggaccacgctaagcggacttcgctctaagcccgcctcccccaaactctctcctgacccccagactccaaccctagtcccaacaaagaatgtaccccgcagtgcagctccttcagtcccacctgcttccctcatggtcccaggcaccaagcctgaagcagggttgaactcccggtgtcctgctgaagctgtgactcctgcaggcctcaccaaaactggggcacctagccctgcatctctaggtccatagcggagcaggctttcggtgctgtgctgtacagatgcctgtatacatatgtacacatataaataaagtgcccatgctgcctgaaaaaaaaaaaaaaaaa

SEQ ID NO: 5 - DNA, 3714 bp, Mus musculus
atgaagaggggtgaaaagccagaagggtacagacagatgaggcctaagacctttcctgccagcaactaccctggcagcagccgacagatgctgcaggagatccgagaatccctgaggaatttatcaaaaccatctgatgcttcgaaggccgagcataacctgaataagatgtcgactgaagatcccaggcaggtgagaaatccacccaaatttggcacacatcataaagccttgcaagaaattcgaaactctctactaccatttgcaaatgaaacaagttcttcccggagcccttcagaagttaatccacagatgtttcaggatttgcaggctgctggctttgatgaggacatggttattcaagctcttcagaaaaccaataacagaagcatagaagccgctgttgaattcattagtaaaatgagttaccaagaccctcgtcgagagcagatgtctgcagcagctgccaggcctattaatgccaccatgaaaccaggaaatgtgcaacattcaattaaccgaaaacaaagctggaaaggttctaaagagtctctagttcctcagagacacggcccatctctaggagaaaatgtggtttatcgttctgaaagccccaactcacaggcggatgtaggaagacctctgtctggatccggcattgcagcatttgctcaagctcacccaagcaatggacagagagtgaaccccccaccaccacctcaagttaggagtgttactcctccaccacctccgagaggccagaccccacctccccgaggcaccactccccctcccccctcatgggaaccaagctctcagacaaagcgctactctgggaacatggagtacgtaatctcccgaatctcccctgttccacctggggcgtggcaggaggggtaccctccaccacctcttaccacttctcccatgaatccccctagccaggctcagagggccattagttctgttccagttggtagacaacccatcatcatgcagagtactagcaaatttaactttacaccagggcgacctggagttcagaatggtggtggtcagtctgattttatcgtgcaccaaaatgtccccactggttctgtgactcggcagccaccacctccatatcctctgaccccagctaatggacaaagcccctctgctttacaaacaggggcttctgctgctccaccatcattcgccaatggaaacgttcctcagtcgatgatggtgcccaacaggaacagtcataacatggagctttataatattaatgtccctggactgcaaacagcctggccccagtcgtcttctgctcctgcgcagtcatccccaagcggtgggcatgaaattcctacatggcaacctaacataccagtgaggtcaaattcttttaataacccattaggaagtagagcaagtcactctgctaattctcagccttctgccactacagtcactgccatcacacccgctcctattcaacagcccgtgaaaagcatgcgcgtcctgaaaccagagctgcagactgctttagccccaacccatccttcttggatgccacagccagttcagactgttcagcctacccctttttctgagggtacagcttcaagtgtgcctgtcatcccacctgttgctgaagctccaagctatcaaggtccaccaccgccttatccaaaacatctgctacaccaaaacccatctgtccctccatatgagtcagtaagtaagccctgcaaagatgaacagcctagcttacccaaggaagatgatagtgagaagagtgcggacagtggtgactctggggataaagaaaagaaacagattacaacttcacctatcactgttcggaaaaacaagaaagatgaagaacgaagagagtctcggattcagagttactccccacaggcctttaagttcttcatggagcagcacgtagagaacgtcctgaagtctcatcagcagcgtctgcatcggaagaagcagctagaaaatgaaatgatgcgggttggattatctcaagatgcccaggatcaaatgagaaagatgctttgccagaaagagtctaactatattcgtcttaaaagggctaaaatggacaagtctatgtttgtaaagataaagacattaggaataggagcgtttggtgaagtctgtctagcaagaaaagtcgatactaaagctttgtatgcaacaaagactcttcgaaagaaagacgttctgctccgaaatcaggtggctcatgtgaaagcggagagggatatcctagcagaagccgacaatgagtgggtggtccgcctgtactactctttccaggacaaggacaacttgtactttgtgatggactacattcctgggggggatatgatgagcctattaattagaatgggcatctttcctgaaaatctggcacgattctacatagcagaacttacctgtgcagttgaaagtgttcataaaatgggttttattcatagagatattaaacctgataacattttgattgaccgtgatggccatattaaattgactgactttggcttgtgcactggcttcagatggacacatgactccaagtactaccagagtggggatcacccacggcaagatagcatggatttcagtaacgaatggggagatccttccaattgtcggtgtggggacagactgaagccactggagcggagagctgctcgccagcaccagcgatgtctagcccattctctggttgggactcccaattatattgcacctgaagtgctactgcgaacaggatatacacagctgtgtgactggtggagtgttggtgttattctttgtgaaatgttggtgggacaacctcctttcttggcacaaaccccattagaaacacaaatgaaggttatcatctggcaaacttctctacacatccctcctcaagctaagctgagtcctgaagcctctgacctcattatcaaactgtgtcgaggaccagaagaccgcctcggcaagaacggtgctgatgagataaaggctcatccattttttaagaccatcgatttctctagtgatctgagacagcagtctgcttcatacatccctaaaatcacgcatccaacagatacatccaatttcgaccctgttgatcctgataaattgtggagcgatggcagcgaggaggaaaatatcagtgacactctgagcggatggtataaaaatgggaagcaccccgagcacgctttctatgagttcacctttcggaggttttttgatgacaatggctacccatataattatccaaagcctattgagtatgaatacattcattcacagggctcagaacaacagtctgatgaagatgatcaacacacaagctccgatggaaacaaccgagatctagtgtatgtttaataaactaggagatcattgtaagaatttgcaagaggcctgaagtgcaggggtttttgaagttttgagaaaattatgcaaatgtgacagagtttgtgtgctctgtgtacaatattttattttcctaagttatgggaaattgttttaaaatgttaatttattccacccttttaattcagtaatttagaaaaaattgttataaggaaagtaaattatgaactgagtattatagtcaattcttggtacttaaagtacttaaaaagagaagcctggtatcttttgtatatataataaataattttaaaatcccaaaaaaaaaaaaaaaaa

SEQ ID NO: 6 - DNA, 3092 bp, Mus musculus
ccgagcgcagcaggccggagcgcgccgcgcgcctgggagggtctgggcgccgcgcctcccgccgcacccgcccgcgcgctcgcaagcccttccttggcgctgggacccctggcgggcggccggaggacatggccggcgacgccgtacagagtgagcctcgaagctggtcgctgctggaacagctgggtctggctggggctgacctggcagcccccggggtgcagcaacagctggagttagagcgagagcgactgaagcgggagatacggaaggagctgaagctgaaggagggcgctgagaacctgaggcgagccaccactgacctgggccgtagcctggcccctgtggagctgctgctgcggggctccgctcgacgcctagacttactgcaccagcagctgcaggagctgcatgcacatgtggtgctgcctgaccctgcagctggaagcgatgctacccaatcccttgcagagggcagccctatctgctcatccaccaacctgagcagagtggctgggctggagaagcagctggccattgagctcaaggtcaaacagggggcagagaacatgatccagacctatagcaatggcagcagcaaggaccggaagctgttgttgacagcccagcagatgctgcaggacagtaagaccaagattgacatcatccgcatgcagcttcgaagagcgctccaggcactacaggctggagagctggagagtcaggcagctcctgatgaagcccaaggagatccagaactgggagccgtagagctacgcattgaggagctacgacaccattttcgagtggagcatgcagtggcagaaggtgccaagaatgtcctgcgcctgctcagtggggcaaaggccccagaccgcaaggcagtcagcgaggctcaggagaaattgactgagtccaaccagaagctgggcttgctgcgggaatcactggagaggcgccttggggagttgcctgccgatcaccccaaggggcggctgcttcgggaggagctcactgcagcctcgtcctcagccttcagcgccatactgcctgggcccttccctgccactcactacagcaccttgagcaagcctgcaccgctcacagggaccctggaagtacgagtggtgggctgcaaaaaccttcccgagaccatcccctggagccctcccccctcagtgggggcatctgggacccccgaaagccgcactccgttcctgagtcgccccgctcggggcctttacagccggagtggaagccttagtggacggagcagcctcagaggggaggcagagaatgccactgaggtcagcaccgtgctcaagctggacaacacagtggtggggcaaacagcctggaagccatgcggccccaatgcctgggaccagagctttaccctggagctggagagggctcgggagctggagctggctgtgttctggcgagaccagaggggtctgtgtgctctcaaatttctgaagttggaggacttcttggacaacgagaggcatgaggtgcagctggacatggaaccccagggctgcctggtggctgaggtcactttccgaaaccccatcatcgagcggatccctaggctccaaaggcagaaaaaaatcttctccaagcagcaagggaaggcatttcagcgagccagacagatgaacatagatgtggcgacttgggtgcggctgctccgtagactcatccctagtgctgtggccactggcaccttcagtcccaatgcatctccaggtgctgagatccggcacactggagacatatccatggagaaattgaatctcggtgctgactcagacagctcgtcccaaaagagcccaccagggctgccctccacctcatgcagcctgagttctccaacccatgaatccaccacatctccagagctgccttcagagacccaggagactccaggccctggcctgtgcagccccttgagaaagtcgcccctgacacttgaggacttcaagttcctggccgtgcttggccggggtcactttggaaaggtgctgctgtctgaattccgctccagtggggagctctttgccatcaaagccttgaagaaaggtgacattgtagcccgagatgaggttgagagcctgatgtgtgagaagcggattttggcggccgtgaccagggcaggacatcccttcctggtgaaccttttcggctgtttccagaccccagagcacgtgtgctttgtgatggagtactcggcgggtggagacctgatgctgcacattcatagcgacgtgttctcagagcctcgggctgtcttctattcggcctgtgtggtgctgggactgcagttcctccatgaacacaagattgtctacagggacctgaagttggacaatttgctcctggatactgagggctacgtcaagatcgcagactttggcctctgcaaggaggggatgggctatggggaccggaccagcacgttctgcggaactccggagttcctggcgccggaagtgctcacagacacatcctacacgcgagcagtggactggtggggactgggcgtgctgctctatgagatgttggttggagagtctccgttccctggggatgatgaggaggaggtatttgacagcattgtcaacgacgaagttcgctatccccgcttcctgtctgcagaggccatcggcatcatgagaaggctactgcggaggaacccggagcggaggctggggtccactgagcgcgatgcagaagatgtgaaaaaacagcctttcttccggtctctgggctgggatgtcctgctggcccgccgcttgcctccacccttcgtgcctacactttcagggcgcacagatgtcagcaacttcgatgaggagttcactggggaggcccccacactgagtcctccccgggatgcacggcccctcacagctgcggagcaggcagccttccgggatttcgactttgtggccggaggctactagccccaagcccctgccttacccaagagttcttgattttttaaaaaacaagcctttggggtttactccatacatgcaaaaaaaaaaaaaaaaaaaaaaaaaaaaaaaaaaaaaaaaaaaaaaaaa

SEQ ID NO: 7 - DNA, 1306 bp, Mus musculus
ctgatgggtctgtgtacactggaagaggtggggctcatgggtaatgcagcatcagagggaggaattgcttatgtaacttggacaacagatttagcagcgcgaaaagaggcagaggctggaaatgggagcagtaagctgtcggcagggacaacacacccgggtgtctgctcctcagaagggtgacaacatccagggtcactgggtccaaggctggaagagcctctggtgtggtatggggaccatcaggtcaggtctggaagaactatggggactacagaggcatcagtgcctacatcaggagctgctccagccagccccactgctactagagaagcctcagtctgagtggccagtgcctcagttcatcagcctctttctaccagagtttcccgtgaggcctgttagggagcagcaggagctgaagattttaggccttgtggctaaaggttcgtttggaactgtcctgaaagtgctagattgtgcccagaaagctgtatttgcagtgaaggtggtgcccaaagtaaaagttctacagcgggatacgctgaggcagtgcaaagaagaggttagcatccagcgacagatcaaccatccttttgtacacagtttgggggacagctggcaggggaaacaacacctctttattatgtgtagctactgcagcatggatctctactccctgtggtctactgttggttggtttccagaggattctatccgtctctttgcagctgaactggtccttgtactgtgctatctccacgacttgggtatcatccaccgtgatgtaaagatggagaatatcctgctggatgaacgaggccatctgaaagtgacagactttggtctgtctcgccacctatcccagggagcacgagcctacactatctgcggcactcttcaatacatggccccagaggtcctgagtggtgggccttacaaccacactgctgactggtggtccctgggtgtgttgcttttctctctggcaactggtaagtttccagtggctgcagagagagatcatgtggctatgttggcaagtgtggcccactgtgaatctgagatcccagcgtctattaatcaggagctctcactcctgctccatgagctcttatgccagaaccctctgcatcgtctacgatacctgcatcacttccaggtccacccgttctttcggggtgtagcctttgaccctgagctcctacagaagcagccagtgaactttgtcatggagaaacaagatacctggcctagtccactggagtccatgtccttcgaggactttgactatgatctggagtcc

SEQ ID NO: 8 - DNA, 3316 bp, Mus musculus
ggtgctcgtgcttagtgctgcgtggagtccggcacagctggggctgcccgatggtccccagctggcggaagcacgggcggagggaggatgacctctccttggggtcacagtgcggacctggcccgcttctacactgtcaccgagccccagcgacaccccaggggctacactgtctataaggttaccgcacgggttgtttcacggagaaatccagaggacgtccaggagataattgtgtggaggagatacagtgacttcaagaaactgcacagagaattatggcaaattcacaggaatgcatttcgacactctgagctatttcccccgtttgctaaagggacagtgtttgggcggttcgacaagacggtgattgaggagcgacggcagtgtgctgaggacctgctgcagttctctgccaacatccccgccctgtacaacagcaggcagctccaggacttcttcaagggtggggtaattagtgatggctctgagttaattggccctgctgaagcttacccagactccccggccaacgcctttcctgagtgcggtactgaaggattctccagtgacagtgaccttctgtccctcactgttgatgcagactctcttgccgaggtagatgatggaatggcttcccgtcagggttctcccagtagaacctttggtctgagtctgtctacggattcttcggcagtaggggctgttgcttctgacagtgaaccaagcagagtagaagaccgggaaagccgcagcctcttccccagcagcttaaagccaaggcttggcaggagagattacctggagaaggcaggggaacttatcaaactggccttaaagaaggaggaggaagatgactatgaagctgcttctgacttttacaggaagggcgtcgatctgctcctagaaggtgtacaaggagagtcgagccccacgcgtcgggaggctgtgaagagaaggactgcggagtacctcatgcgtgcagagagcatctgtagcctccgggccgcgcctcagctccacacgggaccacagcctccaggatcactaagttcaaggcccccttggagcctgaggagccctgccgaggagctgaaggccttccgagtccttggggtgattgacaaggttttacttgtaatggatacaaggacagagcagacattcattttaaaaggtctaaggaaaagcagcgagtgcagcaggaacagaaagaccatcatcccccgctgtgtgcctaacatggtgtgtctgcacacgtacatcatctcggaggaatcggtgtttctcgtgctgcagcgcgccgaaggtggaaaactctggtcgtatatcagtaaatttctgaacagaagctctcaggaaagcttggacattaaggaagggagaccgtccatgcctcctcgagtgtgcctgcagcagccaagtgccagtccccagggcggcagcagcttcgagtccagagggagcgacacggggagcatgctgaaggctctgcctctgaagaccagtctcaccccgagttctcaagacgacagcaaccaggaagacgacggccagcccagctctcccaagtggctggattcgggctccagttcagaggatgagtgcacagcgggctacctgacgctgtgcaacgagtatgggcaagaaaagatggacctggtgtctctgagcgaggagtctgttatgcagcctgaaggggacaaggctgacacccaggcggttagttccccagcatccctcgccactggcagtgtgagccctagcacccacctcagggtcttctctggaggtgaggatctagaggcggtttcttctcctccaacatctgaatccctcagtaggtcaaaaaacagccctatggaattcttcagaatagacagtaaagacagcacaagtgagctcctgggactggattttggtgagaaattacacagtctgaaaccagagcctttgaaagccctctttacccttgaagatggagacagcccttctcagagtcttgatcctggtgagagcaagagagagagtgaagctcaggactccgtgagccggggctcagatgattccgtcccagttatctcatttaaagaggcggctgcagaggctatcagtggggctgaggagggaaggcctgaccttcttgtgaatttacctggggaactgcagccaaccaaagaggcttcagcaatggaccctaagttttcacaggccagtgcaggcaggctggatagtaaactgctggaagccccggatgtgttgtgcctcaggctgagttctgaacagtgccatggtctgggaccagaaggcccagaggaactgagcgatcccactgaattctgtcccggaggtgtgatcccagagcacgatgctcaggcagatcccggggtgctattcgaggctgccgttgatcacaggagctccccagaccagtttctgttttccagcttgcgttccgagtctgacaggctggggcaggtggaggtagtggtcactgcacaggccttgcaagaaagcctgttccacatttctagtccctgctcaggtgctaataaagaacacagtgcatacgccgacactgccacgtcggaggaggtgttgctgttcacagaaccgactaaagaagaagcgaactctctgttccagagagactcggaggcccaggagcgaggtgtgggagccggggaagcagacaaggaaatccatcagatctttgaggacctggataaacgactagcagctagctccaggttcttcatcccagagggctgcattcagagatgggcagcggaaatggtggtagcccttgacgccttgcacagagaggggattgtgtgccgagatctgaacccaaacaacatcttattgaatgatggaggacacattcagctaacgtattttagcaggtggagtgaggttgaagattcctgcgacagcgatgccgtagcgagaatgtactgtgccccagaggttggagcagtcacagaagaaactgaagcctgtgattggtggagcctgggtgctgtcctcttcgaacttctcactggcaagacgttggtggaatgccacccagccggaataaatacccacactactttgaacatgccaggttgtgtttctgaagaggctcgctcactcatccaacagctcctgcagttcaaccctatggagcgcctgggtgctggagtggctggtgttgaagatatcaaatctcacccgtttttcacccctgtggattgggcagagttgacaagatgaacaccacaaggattgtccttaccagacaggtccctggtgacagagttcaggagtggct

SEQ ID NO: 9 - DNA, 2201 bp, Mus musculus
gggaagcttaagaggcccagcgggtgctagacctggagcctaaacctggtggactgggtgcttagcaacgggggaggtgccccgtaacggggtcgtaacggggtgtctaggcagggggcagcacaggaattgtgaatgcttaacagcccagggcaatgtggctggagctaggtgccatgctgcgcaggacctgtggaccgctgggcagggctgttcgtctgccctgtgggggggccctaggacctaggccccactggtgggggccatgtaggagttgcttggcccaaagtgttcatcaagaccagcctggaagaggcctcagtgaagatgacattcgcagggcacgggaggcccggctcaggaaggcaccccggccccagctgagtgatcgctctcgtgaacgcaaggtgcctgcctcccgcatcagtcgcttggccagctttggggggctggctgtgggcttgggcctgggagcgctggctgaggtgactaagaagtccttgccaggtggaagtctgcagcatgagggcgtctctggattgggctccagtcctttcctctccgaggccaatgctgagaggatcgtgcagaccttatgtacagtccggggggctgccctcaagatcggccaaatgctcagtatccaggacaacagctttatcagcccccagcttcagcgaatctttgagagggtccgacagagtgccgactttatgccccgctggcaaatgatgagagttctagaagaggagctaggcaaggactggcaagacaaggtggcctccctcgaggaagtgccctttgctgctgcctccattgggcaggtacaccaaggcttgctaaaggatgggactgaggtggctgtgaagatccagtacccaggtgttgcccagagcatccagagtgacgtggagaacctgctggccctgctcaagatgagtgtgggcctgccagagggcctgtttgctgagcagagcctgcagaccttgcagcaggagctggcttgggaatgtgactactgcagagaagcggcctgtgcccagaccttcaggaagctcttagctgacgaccccttcttccgagtgccagctgtggtgcaggagctatgcactacacgggtgctgggcatggagctggctgggggaatccctctagaccagtgccagggcctgagccaagacatccggaatcagatctgctttcagctcctgaggttgtgtctgcgggaactgtttgagttcagattcatgcagactgatcccaactgggccaacttcctgtatgatgcctccagccaccaggtgactctactggattttggtgcaagccgggcgtttgggacagagttcacggaccattacattgaggtggtgaaggctgcagcagatggagacagagatcgagttctacagaaatcccaggacctcaagttccttacaggctttgaaaccaaggcattctctgacgcccacgtcgaggcagtgatgatcctgggggagccctttgctgcctcaggcccctacgactttggggctggagagactgctcgccgaatacagggcctcatcccggtattgcttcggcaccggctgcgcccaccgcctgaggagacctatgctctacaccgcaagctagctggggctttcttagcctgtgcccgtctccacgcccacatcgcctgccgggacctcttccaagatacctaccaccgctactgggccagtcgccagacactgccgctgccagcagcctcctgactagggacctccctgccgaccccaccatgacagattccatccagggataccagctccacagcaggcagtcccctcctcctctttcttggtctccagaacctagtttcttgccttggatctttgggcccctggagttagctccctgatcctaagtgagcaaccttgaattctgaggctaggagccagcagaatcctgccaccatctaagtgagccttgggtccactctcatgtgaaggagacgcccctcggccccaggtcttccaggatctgcaggcgaaaggggagatggtggctgttgggggcggtcctcacctttgcctcccttgctcctctaccagctgccttcttcccgggttccagcctgtgtattggagggtgggggtgggtgctgatcctttcctccgaataaaggcaccctttccctgcaaaaaaaaaaaaaaaaa

SEQ ID NO: 10 - DNA, 1953 bp, Mus musculus
ggggtcgtctgggcaccagggacgtctgcggcgaaaccgggaagagagcactgccggggacatgtggcggccgatgcgactgtgtcacttccactctaccctgctgcagagcaggcagaagccctggccgtgccctgccatattcttcaggagaaacttcaagagcccaccagcaaggacctcaagagccaggctgctgtggaggcgggcactctctgccactgtggtggggacacccttcctacttggagcctactacttcatggcagaggcatcggagaggaggaagctgcgacttgcagtcgatggtatcgggcgctttggcaggtctgtgaagattggtttgttcatctccacggactactggtggtgcacaaacgttgtccttcgaggagtggaagagaacagcccgaagtatgtggagatcatgtctgcctgtcaccagcgtgcggctgacaccctggtggctggagccatccgcaacgggggcctctatgtgaaactgggccaagggctgtgctccttcaaccacctgctgccgacagagtacatccagacgctgcgtgtgctggaggacaaggccctcactcggggcttccgggaggtggatgagttgttccttgaagacttccaggcactccctaatgaactcttccaggagtttgactatgagccgatggctgctgcaagcctggctcaggtgcaccgtgccaagctacacgatggcactgatgtagctgtaaaggtacagtacattgacctacgagaccgctttgacggagacgtgcagaccttggagctcctgctgcggctcgtggagctcatgcaccccagcttcggcttcagctgggtcctacaggacctgaaggggaccctggtccaggagctggacttcgagaatgagggccgaaatgctgagcgctgtgctcaggagctaaagcacttccactatgttgttatccctcgggtgcactgggacaggtccagcaagcgggtgctgacagctgacttctgtaatggctgtaaggtgaatgacatggagggcatcaagagtcaggggctggcagtgcaggatgtagcaaagaagctgatccagacctttgctgaacagatcttccacactggcttcattcactctgacccccaccctggcaatgttctggtgcggaaaggtccagatggaaaggcagagctggtgctcctggaccacgggctctaccagttcctggacgagaaggaccgatcctccctctgccagctgtggcgggccatcatcctgagggacaatgctgcaatgaagaaacatgcagctgcacttggggtccaagactacatgctcttctctgaggtgctcatgcagcgaccagtacgcctgggccaactgtggggttcccacctgatcagccgggaggaggcggcctacatgcaggacatggcccgtgaacactttgatggcataatggaagtgctcaaggcattgccacggcctatgctgctagtgctgcgaaacatcaacacagtgcgcgccatcaactcgaacctgggcacccctgtcgaccgctacttcctcatggccaagagtgctgtctggggttggagccgcctggtgggtgcagcgtaccaaggcatttacggcagcagcctcctgcgccacatcaaggtcctctgggaggcattaaagtttgagatggccctgaggctggaaatcctagccatgcggctcaccgccctcatgctgcgtgttctggtccgcctgggctttgcccccaaggctgaggccgaggaggtctatcagtacctggagatgtagttccctgagccagaatgactgcaaggctgccggggcgagcagagtttccatcctgcatggccacactgcacaggctccagtgtagatacctacaacctggggcctgcaatgggggatacactacggggttcttaaacacaatg

SEQ ID NO: 11 - DNA, 5591 bp, Mus musculus
ggacaatctacagactatggataaggtagagacagaggcatcagtgaagcccttgtctgggggctcagataagacagaggtgaagcagggtttggaaagcctggctcgggaacgcacagacgaaaagtacccaggcagcaagaaggcagccctgagacccaccagggcgaggcggcccggaatgaaggcaaacaccaagaagcagctgttgagagacagtgcccccaaaggcactctagatctcctccccaaagaaccgactaggcaacccttacccgggagctatggacaagagcccacacacacggaagcaggagctcctggctgggattcccacttccacgcagaagtgtgtattccacttcctgcagagcaagactccaaaatccttcgaccaccagcagacccactttccaaggaagaggacagcagcttcgagggaggtggggcactgcttaataaattatttgaagcaagccagattccagaccggactgaccatcttcagatgcaaattcaggaaaccattggggagagcagttctctcgaccagatgttggccttttcagtgcctgctgaggagtcatctacatttgctggggccacaacacattctgtctccaacttgagtgagatcaacagggaaaatctgtcattggcccaatacccaggactggaaagctgtcctcaaagcctccagcaggaaggcagaccaaacagagacagagacttgcctggtgctctctgggcagaatcagcctgtgaactgagtctcctagaagacaatgaggaagaagagtcgcagcctccagcctcagtggctctccctcagggtgatggtgtcccctgcagggagccagagggtctctctgattctttcccccagcccactgctccctccctccccctggaaaatgtgggcagtgggtcaagggtcagagaagctgcaggtggggtggggtgttttgaagccggtgaccaagaaacatgttatgctaccatggatctccttgttggagcaccagttgataaatatttgcctcaagaaatttgccccgaggacttggagctgacagaaggtcaaagcgaagtgtgtgatttatgttctcctgacaagatactggctgttctacagacacaaggttctgagcctccacggtccacagacaagcgcagccaggatggcaagtcagccgagggccttctttttaacagtaccttcacctgggacacggcaaaggaggccagtgaagatgctgtgggagagacagcagctgatgtggagaatcctccctccaccttctcttctacgctaccctacagtgaaagagggtttggggagacacaacccctttgttctgagactatctcctttgtaaaggatagtgaagggagctacagaagttccagtctcagcatcccagctgccatagacacacttgccagctacagttctgacagggagtgctcaaaagagcagtcagccgaatcaactgctaatgtcgactgtcatcaggtgaccagggagatggagggcatatcaactaatgccgctgaggtccacgaaatcaaatgccactccgtttctgtcccccaggacaatgactttgatgttggtgctgaccaggtctcgtgtgaggcacgagatgaagataattcccaatctcttccagacgacgactcacagtcaggtcgttcattaagtagctccacaggtgaagcaaccggggagactctggtgccagcacccagcagtgcaggagatcatggccacttctccatgcccgagggacagggtttgtgtagcagggctcttcagatggataaccagcctgtgtgtcagagccaggctatggagggagcccacagcagaggccttgaggagcacttccaagaaaagggaagtggaatgaagcatggcatccggccacagagcacatcccaccaggtttctctttctgcaaatgacttccaagaaattttgccctccatacccaccatgcaacaggagaccaatgtggaacccttggagcactccctagcagattccagggaagaaattgagtgtagctcagacccgaggaccagtgacttggtggtggctgagaagactgtgggagaagacagtcatttggtagtcagtgtcccagctctccctgacatcctccttggagagaaagatgacgttgggctaggaagttgggctgtgggcggcaaagtgaagatcataactctagaagctcccgtctttgaaatctggccaccagaactagtgaggcaccctgggtacaaggaggcagaagctggtctcaccatgcctggtaggagctgggctctgtctgacatcctcagagcaggtgccaccagatctgagccaggtgccttgggaggagcagcatgggttcccagcccccaggctgatgctctcatggcccttggagcgaacagggacacctggctaggtgctgcaccagacagacaagcaaactgcaattgtctgtcttcccagtgtctgagtcaaccccgattcctggagtcatctgtagaccctgttgaggacaaggagttagaggtcacggactctccatcagaggtttccaaaactggagagatggaaatgcctgagactctgaatgaggaacaggaggaaacccagcagatactgcgtcaccccgccgttgttaaccagtcggtgaacttccctaggatcctggaatcctctgtggaccccattgacgacaggggtgagctggagggtgtctggcccgagaagccagagccctctgactccagcgtagaaggaaacgaattcattgttggaaacacgtgtcagagggtagacatccaacctgctagcctacagctcccacatccccaggacagcggggaaatcattccatatgaacacacaaccaaccaaaatcgcgtagatggagagagagcagaagccaaaaccagtctgccggataaagccaaagcggaagcagaagctgttgtttggcaggcccaggggcctggtgaagagggacaaggaattccaagtgtatgcagcatgagccaaacacaagatggtggtgacagaagcctaggagaagctgggcaaaggggaacggatgagaccgaggtcatttcccccctgtctcctctttctagctgtctcacaggagtgacacatacatgtgtcaaggctgaaaccaacaactccacaggccacatttatggcggatctgagcccagaacccgtcaaagtgtaattcctatgaagacagaaaagggaactatcgagagcaagtgtgggaaccatgtgcgctcttcagatgatctcacaaacacaccttgtacttcatctcccaaaggaaatgtcacacgcttgtcaataagccatggcctggaggaactgaaatcagagaagctgcagattgcggaaaccaaacccctaaactcatctgactccccaacaatgaccttagctctcatttcaggagaatgtgagtcagagaaagaccccaaaagcttgttacgtagggacccatgtccaaagggctccaccctggatagcgggaagaagtccagagaccaacagcagaagcctgtggcagcccaggtcagcaaggcacctggggaccaatcagcaatggctgggtcagaggagggcaagaagaagcaagaggcttcggggagtggacacttgactgcagggataaagaagaaaattctatccagggtcgcagccctgagactgaggctggaggaaaaggaaaattcgaggaagaactccatcgtgaagaagacacctaagtttgaaaggtccttatcccgcactgatgagaaaagagaccccaaaagggccccttgcaaagctgaagggaaagctccagtattgctgaagaggatccaggccgagatggctcccgagcactccggaaatataaagttgagctgccagttttcagaaatccatgaagactctaccgtctgctggacaaaagattccaagtcgatagcccaggccaagaaaagcgcaggggacaactccagtgtttccttggccatcgtccaagctggtcagaaggaccagggcctgtattactgctgcctcaagaacagttatggaaaagtcactgctgagtttaacctcacagctgaagttctcaaacagctttcaagtcacacagaatatagaggatgtgaagagattgaattcagccagctcatcttcaaagaagatgttttcaatgacagctacttcggggaccacctacgtggccagatctccacggaggagcttcactttggcgaaggggtgcaccgcaaagctttccggagcaaggtgatgcagggcctcatgccggtcttccagcccggccacgcatgcgtactcaaggtgcacaatgccgtcgcccatgggaccagaaacaatgacgaacttgtgcagaggaactacaaactggctgcccaggaatgctacgtccagaatactgccagatactacgccaagatctacgccgctgaagcacagcctctggaaggcttcggagaggtgccggagatcattcctattttccttatccatcggcccgagaacaacatcccatatgccacagtggaagaagagctgattggagaattcgtgaagtattccatccgggacgggaaggaaatcaacttcctcagacgagattcagaggctggccagaaatgttgcaccttccagcactgggtataccagaaaacaagtggctgtctcctggtcacggacatgcagggtgtgggaatgaagttaactgacgttggcatagcaacactagctagagggtacaaaggatttaagggcaactgttccatgaccttcattgatcagttcagagcgctgcatcagtgtaacaagtactgtaaaatgctggggctgaaatcccttcaaaacaacagccagaaacccaagaagcccatcgtcgggaaaggcagggttccgacaaacgccacgcaggtgaagacgcctgagtctgagacgccgcccgcagaaagaaaaacctagcctccctcctcccttcatcaccagtgaccaccaagccagcatcgcgcaggcttgcgcgtggacatctgcaagcacacaagggacacgagcctgcagcctgcagccgagtgccagtcctctcagctcctatcactggctgtctgctgaaatgacaatggcatggctcttccagactagccttgtagagagacttagcagttctgttgatgctctcaaaggcagcccactgtttgtgtacacagctagcctttctacacacaccctcccctcccaccgcatcgtctatctatctgtgtgtcgcgcgtggtttgttgacaagagttcccccgctgccttggcgactggccactgtcaaaatccttcccacctcgaccccctcacctcaggatgttcctgcagtcatgaatgtcaagttgttgttatcagtgtcaccgacgctattgttgctggaggcggcttcccagatgcgagcccatttcccgccactacccacgcagcctggcacagtgttctgtttcattaaattcatatttaagcaaaaaaaaaaaaaaaaaaa

SEQ ID NO: 12 - DNA, 4398 bp, Mus musculus
ggatctcggaattggagcgcagaggagaagtaggcgtcgcagaggcacgtgtatcaacacgtttatttgcacttgaggccaagctggggttttcctggtggacggtgccagagtcagtaacacgactcccagaagacctttcccgcaacagtccctaacggggcgtgtcttggcgtggcgttagacaagcacggtctgagcaaggaaggacttttcttttcagattcccgtttcctgaaacagaagctgttgaggagaaacgctgtgtttccgggaggttgtaccggaataaagactctcccgggtcagactgctgctctgaagtgttattttctgagtacctcagccttcaagggccttctttattgagaatcaatgcctctcctaggtaattgatcaccatagacccagggagactcaattcatcctggagggtgggtaatcgtcatgaataatcaagatgccgtggcttcgatactgcatgagtgcaagcaagtgctggatcgtctcttgttggaaacgccagatgtgtctacagaggacaagagtgaggaccagcggtgcagagcttcactccccagcgagttaaggaccctgatccaggaggcagaggaaatgaagtggcccttcgtgcctgaaaagtggcaatacaaacaagccatgagcccagaggacaaaacaaacctgcaagatgtgattggcgccgggctgcagcagttactggcggccttgcgagcctccatccttgtccaggactgcgctgccgcctccgctattgtcttcttgatggaccggttcctgtatggactcgacgtctccggaaaactcctgcaggtcgccaaaggcttgcacaagctgaagcctgcaacgcccatcgccccgcaggtggtcatccgacaagcccgagtctccgtcaactcggggaaactgttgaaggcagaatacatcctgagcagcctgataagcaacaacggagcaaccgggacctggctgtataggaatgagagtgacaaagtcctggtacagtcggtctgcatacagatcagagggcagattctgcagaagctaggcatgtggtatgaagcggcagaattgatatgggcctctgtcataggatatctgacactccctcagccagataagaagggcatttccacatcactgggcatactggcagacatctttgtttccatgagcaaaaccgattatgaaaagtttaagaagagcccaaaggttaacttggccctgctcaaggagtttgaccaccatttgttgtcagcctcggaagcctgcaagctggcagctgccttcagtgcctacacacccctctttgtgctcacggctgtgaatatccgtggcacatgtttgttgtcatatagctgttctgctgactgccctccgggaatgaaaagtgtgcatctgtgtgaagccaaagaagcttttgagattggcctcctgaccaagaaagatggcgagctggttagtggcaagcaggagctgcacagtttcatcaaagctgctttcggcctcaccacggtgcactccagactccatggggagacagatgcagttcgcgcagcaaggcagctatgcagtgaagctgtgggcaagctctacaccttcagcacttcccccacaagccaggacagagaaggcctgtctcaggaaatcatgtctctcatcagccaggtgaagggacatctacgagttcaaagcttcccaaatttagatgcttgctcttatgtcccagagagtttcaagtgtggtttagatcgactcatcttgcatggacacgtggatttccaacaaattcttgaaacctattcccagcaccatacttcagtgtgtgaggtatttgaaagcacttgtgggaacagcaaacgcaaccagagagacacaaaatcggaggtctgtattaccactctgaagacagaaacaaacaccgcagatactatggttgctactctagagagggtgagttcccaagacagcaggagtacagcttcttccaaaatgtctaagaaagatcaagggaagctccaaagagaaagggggagaagctggacccattccaaggcattccgagtctccctggatctagatatggagactgagactgagccaccaaatcacagcaatggagggacagatgttttcaacaagtctctgagagacaactctagctcctgttcttggggcagactgtcagggctcagctcttccacaagctgggaggaagtgaactgcgctgttcaggatgtagtaaggaaagggtctggccaagaagagcatcctgtggaggcgcaaagctctgaggcagcgtctgaggagcccaagaggaacagaagcagcagagctgtgtatttgtcttcaaagctccgtggtgtctctcttcagacaactggagatgacaacttagagtcttcaccaagtcagttacacaatcacacatccatccttcctttcaatgcaaaagatacttgtttggcctcgggtgcaggactggtagaaaccgctgaaggatctagcaatacttctcttcagtccagtcattcgtgtggttctgattcctggtccttgtctagttcagacaggttcacggatgtgaccacgaatccttcagttcaggaagaagaaccctctggaataatgggtgatgtcccagaatccaagtatgactgtaaagactggcacggagaaaagaatgggggaacactcgctgaaatatgcacagggcctgaattaacatctgccccctcttcggtcgacccagaaggagaaacagcagaaagcacagacgatggactatcaccctctcaggtagccctgggatgtttagaaggcagccattcaatgtctacgcgtaggactttctttccggatgggtcggttcaaaacgctgactcagcaaagactggctgctcagtcagagaccagactgtcgaccctgatgcctcaacggtggatgaggagggccaaatgcttgacagcacagagatctgctccattggccaagatggcgctcacagaccacgtgctttgaggtccggtcagagtgcggaggggccaaagtcctttgtaaatggctccagtccttcccctatcttcgatgaggacttcagcaccacagaggaaggagaggagcttgggagcatgctgaagagcagccaaaactccagctcatactcaccatggtggctaaaatcaccagccttttcccgcagttcgtcagatggggaaagctcctggtctctgctgaactcaagcagaagttccttcgcctcgctggcaggacagaccagtcaagagatccttgaggctcgaaccctacagcctgatgaccttgaaaaacttctggcgggcgtgaggcatgattggctgcttcagagactggagaatactggcgttttgaagtccaatcaactccaacaagcccacagtgcccttctgctaaaatattccaaaaagtctgagttgtggacagcgcaggaaactgtggtgtatctgggagactacctgaaagtgaagaagaagggcaagcagagaaatgcattttgggtccactatctccatcaagaggaaaccctggggagatacgttgggaaagaatacaaagagaggaaggggctccggcaccacttcactgatgtggagcggcagatgacagcacagcactacgtgacagagtttaacaagagactctacgagcaaaagattccgactcagatattctacatcccctctacaatattactgattttggaagacaggactataaagggatgcatcagtgtagagccttacatcctgggggaattcgtcaagttatccaataacaccaaagcagtcaaaaatgagtacaaagctacagaatatggcttggcctatggccatttttcttatgagttttctaaccatagagatgtggtggttgatttacaaggttgggtgactggtaatggaaaaggcctgatctatctcacggatcctcagattcactctgtagaccagaaagatgtcactacaaactttggaaagcggggaatattttacttctttaataaccaacatgcaagctgtaatgaaatatgccatcgtctttctctgactagaccttcactagagcaaacaagtaaggtatagcctgtgggttgggagttgacaagacttcaagagcctagcatcagatcctacagaccttattccctctgacacagggacatgtctggtggctgtcctagtctctacagttgtatatgatgttcgagatcctgagttgtatgaagaccacatgggaaaagggccccaaccaacccacaatggatgcagacctcagctgaaaacaaactgctgtcattaagccattgtggtttcggtttgttttgttgttgtgtagta

SEQ ID NO: 13 - DNA, 6478 bp, Mus musculus
ggtgagaacgccgcgccgccgctgagccggactccgggcgcgcagctcggcggcgcaggtgagccggccgcgccatggtggactcggtgggcttcgccgaggcgtggagggcgcagttcccggactcggagccgccgcgcatggagctgcgctcggtgggtgacatcgagcaggagctggagcgctgcaaggcctccattaggcgcttggagcaggaggtgaaccaggagcgcttccgcatgatctacctgcagacgctgctggccaaggagaagaagagctacgatcggcagcgctggggcttccgccgtgcagcgcagccccccgacggcgccgccgagccccgagcgtccgccccgcgcccgccgcccgcgcccgccgacggcgcagacccggcgcccgtcgaggagtccgaggcgcggccggacggagaggggtcaccgagtaaggggcggtcagcgtccgcccgcaggccagcggctgctgcatcggcggaccgggacgaccgagggccccccaccagcgtggcggcgctcagatccaacttcgagaagatccgcaagggacctgcccagcccggctctgccgacgccgagaagcccttctacgtgaacgtcgagttccaccacgagcgcggcctggtgaaggtcaacgacaaagaggtgtccgaccgaatcagttccctgggcagccaggccatgcaaatggagcgcaagaagtcccagcagagcgccgggcagggcctgggggaagcacccagaccccattaccgtgggcgctcctcggaaagcagttgcggccttgacggtgactatgaggatgcagagttgaatccccgcttcctgaaggacaacctaataaatgccaacggcggcaacaggcccccttggccgcccctggagtaccaaccctaccagagcatctatgtcggaggcatgatggtggaaggggagggcaagagccctctcctgcgaagccagagcacttcagagcaggagaaacgcctaacctggcctcgcaggtcctactcgcctcggagtttcgaggacagcggaggtggctacacgccggactgcagctccaacgagaacctcacctccagcgaggaggacttttcctctggccagtccagccgcgtgtcaccaagccccaccacctaccgcatgttccgggacaagagccgctcaccctcgcagaattcgcagcagtcctttgacagcagcagccccccgacgccacagtgccagaagcggcaccggcagtgccaggttgtggtgtctgaggctaccatcgtgggtgtccgcaagactgggcagatctggcccagtgatggggacagcacctttcaaggggaagcagattcctcgtttggaacaccacctggatatggctgtgccgcagaccaggctgaggaacagcgccggcaccaggacgggctgccctacatcgatgattcaccttcttcctcgccacacctcagcagcaaaggcagaggcagcctggcctcaggcgccctggatcccaccaaagtgagtgagctggatctggaaaagggcctggagatgagaaagtgggttttgtccggaatcctggccagcgaggagacgtacctgagccatctggaggccctgctgctgcccatgaagcctctgaaagccgctgccaccacctctcagcctgtgctgaccagccagcagattgagaccattttcttcaaagtgcctgagctctacgagatccacaaggagttctacgatgggctgttcccccgagtgcagcagtggagccaccagcagcgtgtaggggacctcttccagaagctggccagccagctgggtgtgtaccgagcctttgtggataactacggagtggccatggaaactgcagagaagtgctgtcaggccaacgctcagtttgcagaaatctctgagaacctgcgagccagaagcaacaaggatgtcaaggactcaactaccaagaactctttggaaactctgctctacaaacctgtggaccgggtgacgaggagcacgctagtccttcacgacttgctaaaacacaccccgtccagccatcccgaccattccctgctgcaagacgccctccgaatctctcagaacttcctgtccagcatcaacgaggagatcacgccccgccgacagtccatgacggtgaaaaaaggagagcaccggcagctgctgaaggacagctttatggtagagctggtggagggggcccgcaagctgcgtcacatcttcctgttcactgacctgctcctctgcaccaagctgaagaagcaaagtggaggcaaaacccagcaatatgactgtaaatggtacattccgctcacggacctcagcttccagatggtggatgaattggaggcactacccaacatccctctggtgccagatgaggaactggatgccttgaagatcaaaatctcccaaatcaagagcgacatccaacgagagaagagagcaaataagggcagcaaggtcatggagaggctgaggaagaagctgtcagagcaggagtcactgctgctgttaatgtctcccagcatggccttccgcgttcacagtcgcaacggcaagagttacacgttccttatttcctctgactatgagcgagccgagtggagagaaagcatccgagagcagcagaagaaatgtttcaaaagtttctctctgacatctgtggagctacaaatgctgaccaactcatgtgtaaaacttcagacggttcaccacattccactgaccatcaacaaagaagatgacgagtctcctggactctacggcttcctgcatgtcatcgtccactcagccaccggctttaagcagagctcaaatctctactgcaccctggaggtggattcctttggatattttgtgaataaagcaaagactcgagtctacagggacacaactgagccaaactggaatgaggagtttgagatagagctagaaggctcccagaccctgcggatactatgttatgaaaagtgttacaacaaaatgaagatgacgaaggaagatggtgagagcgcagacaagctcatggggaaaggccaggtccagctggacccccaaaccctacaggacagagactggcagcggactgtcatcgacatgaatggaattgaagtgaaactctccgtcaagttcacgagcagggagttcagcctgaagagaatgccctcccgcaaacagacaggggtcttcggtgtcaagattgctgtagtcacaaagagagagaggtccaaggtaccttacattgtgcgccagtgtgtggaagagatcgagcgccggggtatggaggaggtgggcatctaccgagtgtctggagtggccacagacatccaggcactgaaggcagcctttgatgtcaataacaaggatgtgtccgtgatgatgagcgagatggacgtgaacgccattgccggcacgctgaagctctacttccgtgagctgcccgagcccctcttcacggatgagttctaccctaacttcgcagaaggcattgctctttcagaccccgtcgcaaaggagagctgcatgctgaacctgctgctgtccctcccagaagccaacctgctcaccttcctcttcctcctggaccacctgaaaagggtagctgaaaaggagacggtgaacaagatgtccctgcacaacctcgccacggtctttggccccacactgcttcggccctcagagaaggaaagcaagctccctgctaaccccagccagcccatcaccatgactgacagctggtccctggaggtcatgtcccaggtccaagtgttgctgtacttcctgcagctggaggccatccctgcccctgacagcaagagacagagcatcctgttttccactgaagtctaaaagccaggcatcagtcatctcattaggaggcccacagaatgacctggaaaactgggacgagagaacccgcccacagagtgggaatgagacccttcctgcggtgtaatttagccattccgaagctctgggccatctgccaagagacaagtacccaaagcgaaaggccaaggggcctgcgagaatccaggtgtgtctgcaagccccaggctggcccccagactgtacctttcccttgttgccaccagagggcaccccaagtcagcccatctgcaagcctgcggacaagggaaaagaggcggagaagagagtggtttttacgaatctaatttatcagagttttaaaaaaaaaaaatctctactggatcatttgttccgatgcaccctctctggggaatagggacaccgtcagatcccttactgttgtgtcttgaataaacactgctgctgcttcctattgtgggggccacagccatgtccctctgtttaggtggggatgccttcacgttccctgacgtagaaattccgctgtgtgtgtgacagggtctgagatgctgactcggcactgtaacatcgtcagccctggctgcttgctccgtcctcccagaaggatggatgtatgtgcagaagcaggtcaggctcctgttctctgatactcttgtctgggctctctatgcacctctcaggagtgtgctcctccacagcccagaagtgtcccaggacccagcacggggaaggagaccctggtcgtcacgcaccttacaattccttctgcagggagagtggccgagcccactgatccttacagcctcccttctgtcttacaaaggctgtgatatctccagcctggctctgactgctgtctctctccctcgttgccccatctaagagaccactcccttcccttgctcccgtctgagcagactcggttacctttctcagccatctctgctccaagacagcagtttcctctagtggcttgttttaatactttgatccgaaatagcttttgatacttgaatatttttaagttttatacgtagtttctaattttttttttcctaatgggttcagacacctaataagatactagaatgtacaccgtggacaggccatgtccaggcagggttttgtcttcctttgagagccggcttccttttgtttggagtcgtttctgatgcctccctccagagcatcagaaatatgggaagaaggctaggaaagtcaggcctggggataggagcaagatggaaagctagcccacctgcggccctcccacctcaatccctgtcgctgggtgggagtcggagtagttgtctcttactggccaccctagttagcaaagggaaagggaaaaccactgattgtcttcaagaaggaatcccataaacccttgcatcatttcttaaagggtagaatcccacccttgggtgacagaggcagagttgccatgagctcaggaccagccttggcagcatcatgcttatctggacagccaagactactgtgtagggctggcgtacaagtagctggggagagaagaaaaaaggctgacgagagacttgaatcctgagctgctcctgcaggaaggcataattttaggggtgtagactgcctgtcccgtgaggactcctgcacccggtcacataccccacagcccctcccatgtctggacggtgggtatgcccaccgatggcatccaccaaccccacagcacatgggggacccctgagaggcagagccatgtcttcccctcccgtctgctcttgaacctgcctaaggtattgggcaggaaacaaaagaccctacagggtctctgtctgcatacagtgtttagttggcttttttttttcccctcagcagagctacccattggtctgctcttgagcatttttggacccactgggctcctctagtttggctgttcatcccagtccatgtcatggctctgaccctgtaaggggagcactgctgagaaaagctgagtaacctcccagccccccactgttgtttctgcacctcctcccctcccctcccccccaacccattgtttgctttgtgtctgtcaccttgaactggaaagcaatatatcaatgtgccaatgtgcattccctggcccaccccctgcctcggttcactttatttatttaggttatgtgttatttgatgatggaatgagcatccctgtgtcggtctaaaaagtgcccctccgccatcgggccacggcagcagtgactggggctgcctctcttaccgcctcacgccttgcaggcctctaagctggcaaagaaaatacatggcgttgtccaggaatgggggtgactcagctttaccctctgcaaagagaatgacggccccagtccgttatgaccgcccaccaggcgtggctgccagacgctaaaggaagaagtgatactttcttaccttgggacctgggtcctgggcacagtgggcttggctttcctggtggtagcctggcctctgcagtgggtggatggtctcttagctgcgatcctgcttttgaactcggctgtctgtactaccactctgtaccagaaggaccacggacactctcattaaagtctcctgagact

SEQ ID NO: 14 - DNA, 8184 bp, Mus musculus
aaaaataccccgtggagtaggtcacgcactcgcctgggagggaaagtgggcgggcacgtccgctgtcggctccgcccctgtcgcctctgggatttccccagggttccaaccgcaaccgagagcggcttccgggaggagaattttggacctcgcggggctccgtcgacgctccgccctctccaccggaggcggctgtggagaagcccggcgccggcggcggctgttttgagagccgctcggtgtcaccatgggcgaccacgggctggagctggcgtccatgatccccgccctgcgggagttggccagtgctactccagaagaatataacactgttgtacagaaaccaagacagattctctgccagttcattgacagaatacttacagatgtaaatgttgttgctctagaacttgtaaagaaaactgacgctcagccgacctctgtgatgttacttgattttatccagcacatcatgaagtcttctccgcttatgtttgtaaatgtgaatggaagccagggccaaaatgaggccaaagacagttgtattgaattcagtcattggatcattacaagacttttacggattgcagcaactccatcctgccacatgctacacaagaaaatatgtgaagttatctgctcgttattatttctttttaaaagcaagaatcctgctatttttggggtactcacaagagaattactttatctttttgaagacttaatttacctccacaaaagaaatgcagtgggtgaggttatggaatggccagtggttgttagtcggtttttaagccgattggatgaacatatgggatgtttacagccagctcctttgcagttcatgaacgtgcaaaatgtagaatttattgaagtcactctattaatggttcttattcatattgttccaaccgtgttttttagacgacaagaattgttactgtggcaaatcggctgcgctctgctagagcacggtagtcccaaaatcaggtctttagcaattagccttctaactgagctctttgagcttggagggttaccagcacagccagccagcacttttttcagcttatttttggagttgctacaacaccttgttggaatggatgctgaccaattgaaattgtatgaagagccattgtcaaagctgctaaaaacgctctttccctttgaagcagaggcttatagaaatattgaacctgtctacttaaatgtgctactggaaaaactcagtgtcatgtttgaagatcgcgtgcttatgcggctcaagtctgatttgctgaaggctgctttgtgtcatttactgcagtatttccttacatttgtgccagctgggtatgaatcggctttacaggtcaggaaggtttatgtgacaaatatttgtagagctcttgtagacgctcttggagttcagaaacatgttgggtatttgttgggaccattttatgcagccttgaaaatggaaagtaaggaaattattgaaagaattcaatgccaagctcaacaggagaatctcagtggtaataatgatgaggtgtcaccaaagaggcgtaaactcagctcctctctcagctcttacaaaaagccatccagacagcctgaagaaattattcatgtggatatggacaaaaagagcatattatggaatgttctgaaacagaaagccgaatcccttcagatctctctcgaatgtggtactctcaagaattctgttgctgaggcattagaaggaatcactgttgtattacagctgactgctctctgcactgttcactgttctcatcaagacatggatggccataatgtcaaggatcatcaacacaaatataagaagaaacctccagtagtagtaacttggatgtctttggatttttatacaaaagtgcttaaaagctgtaggagtttgttagaatctgttcagaaacttgaactggaattagtcattgatagcatggtgagaatttgtgatgctctgatgtatatgcaagtaaaaagttcattcaaggatcatgttctggaagagttatgtggaatgctctcacttccatggatttattcctattctgatgataactctttaaagatgaccacatttgctactaaccttctgccattaagccagagggtttgggatagttactctccacaggcacagtcaaaatgtgtgtttcttctgacactgtttccaagaagaatattccttgaatggagaacagcagtttataattgggccctaaagagctcccatgaagtaatccgggctagttgtgttaaaggattttttatcttattgcatcagcagaattcttgtaaccaaattcccaagatgcttgtagatagagtcaaagatgattctgacatggtcaagaaagaatttgcttctgtccttggtcaacttgtctgtactcttcacggcatgttttatttgagttcctcagtagagccttgctttgaacatatggacttgttcagtaagaacctgaaagccacttctcagcatgaatgttcatcttctcaagtaaaagcttccacttgcaagccattccttttcctgctgaccaaaaatacacctagtccagtaaaacttgctttcatagacaatctacatcatctttgtaagcatcttgattttcaagaagatgaaagagaggtaaaagcagttcttgggactttattaaatttgatggaagatccagacaaggatgttagaattgcttttagtggaaatatcaagtatatattggaatccttgaactctgaagatggattcgtaaaagagctttttgtcttaagaatgaaggaagcatatactcatgcccaaatagcaaggaataatgagctaaaggatactttgattcttacaacaggggatattggaagggcagcaaaaggagatttgatacctttcgcactcttgcatttactgcattgcttgctgtctaagtctgcatccgtctctggagcggcatacacagagattcgagcactagttgcagctaaaagtgttaaactgcagaattttttcagtcaatataagaaaccgatctgtcagtttttggtagaatctctccactccagtcagatgacagcactcccaagtgctccttgccagtcttctgagattcgaaaacaagatgttgctcatcacagagagatggctttaaataccttatcagaaattgccaatgtttttgactttcctgatcttaatcgtttcctgacaaggacattacaagttctgcttcctgatcttgctgccaaagcaagtcctgcagcatcggctctcattcgaactttagggaaacaattaaatgtcagtcgtcgagagattttaataaataacttcaaatacatcttttcccatttggtttgttcttgttccaaagatgaattagaacgtgctcttcattatctgaagaatgaaacagaaattgagttggggagcctgttaagacaggattttcaaggattgcataacgaattattgctgcgtattggagaacattatcaacaagttttcaatggtttgtcaatacttgcctcatttgcatctagtgatgatccatatcagggaccacgagatattacatcacctgaactgatggctgattatttgcaaccaaaattgttgggcattctggccttttttaatatgcagttgctgagctccagtgttggcattgaagataagaaaatggccttgactagtttgatgtctttgatgaagttgatgggacctaaacatgtcagttctgtgagagtaaaaatgatgaccacactgagaactggtcttagattcaaggatgattttcctgagttatgctgcagagcatgggactgctttgttcgctgtctggatcacgcttacctgggacccctgctcagtcatgtcatagtggctttgttacctctcatacacatgcagcctaaagaaactgctgctatctttcactacctcatcattgaaaacagggatgctgtgcaagattttcttcatgaaatatattttttgcctgatcatccagaattagaaaagataaaagcagttctccaggaatatagaaaggaaacctctgagactactgatcttcaaaccactctccagctatctatgaaagcaattcaacacgaaaatgtagatgttcgaattcatgctcttacaagcttgaaggaaaccttgtacaaaaatcaggaaaaactgataaaatatgcaactgatagtgagacagtggagcccgttatctcccagcttgtgacggtaattctgaaaggctgccaagatgcaaactctcaagctcgcttactctgtggggaatgtttaggagaactgggggcaatagacccagggcgattggatttctcaacaacagaaactcaaggaaaagattttacatttgtgactggagtagaagatttaagctttgcctatggattgctaatggagctaacaagagcttaccttgcatatgctgataacagccgagcacaagattcagctgcttatgctattcaggagttgctttctatttatgactgtagagagatgcagagcaatggcccaggttaccagttgtggaaaagattccctgagcatgtccgggaaatattagagcctcatctcaatactagatataagagttcccagaaatcaacagattggtctggagtaacgaagccaatttacttaagtaaactaggtaataactttgcagaatggtcatcatcttgggcaggttatcttataacaaaggttcgggataatcttgccagtaagatcttcacatgctgtagcataatgatgaagcatgattttaaagtcaccatctatcttcttccacatatcctagtatatgtcttgttgggttgtaatcaagaagatcagcaagaggtttatgcagaaattatggcagtacttaagcatgatgagcagcatgccatcagtacccaagacagtgcatctgatctgtgccagctgagtacacagactgtgttctctgtgcttgaccatctcacccaatgggcaaggcacaaatttcaggcattgaatgctgagaaacttgcacaaaacaaaccaaaaggagtatcaaatgtgaattttgaagactatcagagtgtaactcgttttctagacctcatacctcaggatactctggctgtagcgtcctttcgttccaaagcatacacacgagccgtaatgcactttgagtcatttattacagaaaagaagcaaaatattcaaaagcatcttggatttctacagaaattgtatgctgctatgcatgagccagatggagtggctggagtaagtgcaattcggaaagccgagccatccctgaaggaacagattcttgaacatgaaagtattggcttgctgagggatgccactgcctgttatgacagggctattcagctagaaccagaccagatcattcattatcatggtgttgtgaagtccatgttaggtcttggtcagctgtctactgttatcacccaggtcaatggagtacatgctaataggtctgaatggacagatgaattaaacacatacagagttgaagcagcttggaaactgtcacagtgggatttggtggaaaactatttagcagcagacgggaaatccacaacatggagtgtcagactaggacagctactgttatcagctaaaaagagagacaccacaactttttatgacacactgaagctagtgagagcagaacaaatcgtacctctctcagctgccagctttgaaagaggctcctaccaacgaggctatgagtttattgtcagattacacatgttgtgtgagttggagcacagcctcaaaccgctttttcgcaagtctccaggtgacagttgtaatgaagactctctgaactggggagctcgacttgaaatgacccagaattcctatagagccaaggagcctatcctggccctccggagggctttattaagtctcaacaaaaggccggattacaatgaaatggttggagaatgctggctacagagtgccagggtagctagaaaggctggccaccatcagacagcctacaatgctctccttaatgctggagagtcacgacttgctgaactgtatgtggagagggcaaagtggctgtggtccaagggtgacgttcaccaggcgcttattgttcttcaaaagggcgtggaattatgttttcctgaaaataagtccccatctgagagtaagcacatgctaatccatggccgggccacactgctagttggccgctttatggaagaaacggctaactttgaaagcaacgcagtaatgaagaaatacaaggatgtgaccttgtttctgccagagtgggaagatggacatttctaccttgccaagtactatgacaaattgatgccgatggtaacagataacaaaatggaaaagcaaggtgatctcatccgatatatagttttacattttggaagatctcttcagtatggaaatcagttcatatatcagtcaatgccacgaatgttatcgctatggcttgattttggtgctaaggcatacgaatgggaaaaaggtggtcgttctgatcgtctgcaaatgagaaatgatttggctaaaataaatagtgtactcacagagcacacaaatcggttagcaccatatcagtttttgactgctttttcgcagttgatctctcgaatatgtcattctcatgatgaagtttttgttgtcttgatggaaataatagccaaggtatttctggcctatcctcagcaagcaatgtggatgatgactgctgtgtcaaagtcttcttatcccatgcgtgtgaacagatgcaaggaaattcttaccaaagccatccatatgaaaaagtctttagaaaagtttgttggagatgcaactcgtttaacagacaagctactagaattatgcaacaaatcggtcgatggaagcaattccacattaagcatgagcactcactttaaaatgcttaaaaggcttgtagaagacccgaccttcagtgagatcctcattcccctgcagtcagtcatgatccctactcttccgtcagttctgggtgcccatgcgaatcatgacccctttcctgggcactgggcctatcttgcaggcttcgatgatgtggtagaaattctttcttctcttcagaaaccaaagaaaatctctttaaagggctcagatggaaagttctacatcatgatgtgtaaaccaaaagatgacttgagaaaagactgtagactaatggaattcaactctttgattaacaagagcttaagaaaagatgcagaatcacgtcgaagagaacttcatatccgaacatatgcagttattccactgaatgatgaatgtgggattattgaatgggtgaacaatactgctggcttgagacctattctgaccaaaatatataaagaaaagggagtgtatatgacaggaaaggagcttcgccagtgtatgctaccaaagtcagcagctttatctgaaaaactcaaagtattccaagaattactcctgcccaggcatcctcctgtttttcatgagtggtttctgagaacattccctgatcctacatcatggtacagtagcagatctgcatattgccgctctactgcagtcatgtcaatggttggctacatcctggggcttggagaccgtcatggtgaaaacattctttttgactctttcactggtgaatgtgtacatgtagatttcaactgtctttttaataagggagaaacgtttgaagttccggaaattgtaccatttcgactgactcataatatggttaatggaatgggtcctatgggaacagagggtctatttcgaagagcatgtgaagttacactgagactgatgagggatcagagagaacctttaatgagtgtcttaaagacttttctacacgatcctctagtggagtggagtaaaccagtgaaaggacactccaaagcaccactgaatgaaaccggggaagttgtcaatgagaaggccaagacccatgttcttgacattgaacaacgactacaaggtgtgatcaaaacccgaaatagagtaacagggctgccattatctattgaaggacatgtgcattacctcatacaagaagctactgatgaaaacttactctgtcagatgtaccttggttggaccccatatatgtaaaataaaattatttcaaagaaaaaaaaaaa

SEQ ID NO: 15 - DNA, 1735 bp, Mus musculus
cgcagactcagttcctggagaaagatggcgacggccgagaagcagaagcacgacgggcgggtgaagatcggccactacatcctgggggacacgcttggtgtcggcaccttcgggaaagtgaaggtgggcaagcacgagttgaccggacataaagtggctgtgaagatactcaaccggcagaagattcggagccttgacgtggtgggaaaaatccgccgggagattcagaacctgaagctgttcaggcaccctcacatcatcaaactgtaccaggtcatcagtacaccatctgatattttcatggtgatggaatatgtctctggaggagagctatttgattatatctgtaaaaatggaaggttggacgaaaaggaaagccgccgtctgttccagcagatcctttccggtgtggattattgtcacaggcatatggtggtccacagagatttgaaacctgagaacgtcctgcttgatgcacacatgaatgcaaagatagccgactttggtctttcaaacatgatgtcagatggtgaatttttaagaacaagctgtggctcacccaattatgccgcaccagaagtcatttcaggaagattgtacgcaggccccgaggtggacatctggagcagcggggtcattctctatgctttgctgtgtggaaccctcccttttgatgatgaccatgtgccaactctttttaagaagatatgtgatgggatcttttatacccctcagtacttaaacccttcagtaatcagccttttgaaacatatgctgcaggtggatcccatgaagagggccgcaataaaagatatcagggaacacgagtggtttaaacaggaccttccgaagtatctctttcctgaggacccatcttatagttcaaccatgatcgatgacgaagccttgaaagaagtgtgtgagaagttcgagtgttcggaggaggaggtcctcagctgcctgtacaacagaaaccaccaggacccactagccgtcgcctaccacctcatcatagacaacaggagaataatgaatgaagccaaagatttctacctagcaaccagcccacctgactctttcctggacgaccaccatttaactcggcctcaccctgaaagagtaccgttcttggttgccgaaacaccacgggcccggcacaccctggatgaattaaacccacagaaatccaaacaccaaggtgtacggaaggcaaaatggcatttgggaattcgaagtcaaagccgacccaatgatatcatggcagaagtttgtagagcaatcaagcagttggattatgaatggaaggttgtaaacccctattatttgcgtgtacgaaggaagaatcctgtgacaagcacattttccaaaatgagtctacagctataccaagtggatagtaggacttacttgttggatttccgtagtattgatgatgagattacagaagccaaatcagggactgctactccacagagatcgggatccatcagcaactatcgatcttgccaaaggagtgactctgatgccgaagctcaaggaaagccctcagacgtctcccttacctcatctgtcacctccctcgactcctcccctgtcgacgtagctccaagaccaggaagtcatacaatagaattttttgaaatgtgtgcaaatctaattaaaattcttgcacagtaaacctaaaattttgcttatttctttgatgcaataagcatgcataataaataatagccaa

SEQ ID NO: 16 - DNA, 1446 bp, Mus musculus
atggccagccacatggaagagaacatccttgaaaaggatttcaggatgttgtcatctctgggttgtggttcattcggggaggtaaagcttgcctgccatcttcccacacttatacgggtggctgtcaaggtccttgagaaaaacatcaacagcatggctgacatcacttcgaagctggaactccttcaatctttagaacacaggaacattgtttgattttttcacatgattgacacactgacaacaacttatgtgatcatggagaatgtggcaggagaggaccttgagaagtacctcagggcactgggctgtctgaaagaggaggaggctagacctgtttttcagcaggtcgtgtcagcagttcacttcctccaccaaagacacattgcacatcgcaatattaaattagaaagcattctggtcgatgcagcaggaaatgcaaagctttgtgactttggcatggcaattaaaaccacagaagggcagatgttggaggaaacctgtggctccttactctatagggccccagagatcttggcaaggaaaccctatgatgggctggcagttgacatgtggagcttaggcatcgtcctctatgttctggtcacagggcactttccatatgtagaagccaccattgaggatatgcacagggtcatcactactacagtgtgtcccattccttaccacttgtcatttccgtgtcacatcatcattgcatggttacttggggtccctacctggcacaggatgacaatacatcagcttgtggaacgaccgtggctgggccacattcaagaccatggactggttgccacaaaagaaatccttcccaggatcgtgaacacaatgtgcaccattggctatacctgtgaagagattgtgtcatccttaacaaataggtgactcaaagatgaagtaatggcaacatttaatattttaaaataccagctgagctatggggacagccatcaacaggtggagaagccctgggcaaatagcagcccttcaggtgcccttatcccccttccccacttgaagaggagatccagtgaacctaccttttcaacctgtatagaagctaggaagagtaactttcaggatgagaatgtggaaagaagaagcaagagttgcagaagttaccccatacacaccaaaagctcctgcacagagaggatgccctattcagatgacccagtgccggaaagtgatgctgtgacagctgatgtcactaacagtgctacaggggatattgtagtcaacagagattccacgaacagcatgcttggtgagcatgtctctccactatcagcccacgttggccccacagcttctagatctaggtcactcacagtttggaagcgaatttcccgtgctctgaaatcactatggtgctgctgctgttgctgctgctgctgctgcatctgtgtgccctccccacggtga

SEQ ID NO: 17 - DNA, 534 bp, Mus musculus
aaaatcatttatattattctagaacacctaatttgttgggagttgttgggcagagttgtggaatttagcaatctacaggagaaagaataccataggttatttaaacaaatgacatatgccctccagtattgtcaccagaaacgtaatgcccacagggatttaaagcccaaaaatattttagtggactccaaagggattaagcaaaaaattatcatgattcataagctagcaactttcaaacagatttcccatttttatgccccaggacactttgaaggtaaagattatgatggccatgcagttgctgtcaggagatctggagttgcgctttactttatgttgagaggatgctttcctttccagaaaataatcttaagaactgaagcagaagtcattgctaaaaagtacattgtaaaattcaagctgtcatcagaacttggcaacatgattgctaacatgataactatagactccggacaaaggccaacagtacatgacattgtgagatttgaatggctaaattatgactattaa

SEQ ID NO: 18 - DNA, 1479 bp, Mus musculus
  misc_feature (163)..(164): n is a, c, g, or t
  misc_feature (1317)..(1318): n is a, c, g, or t
atggccagcaactccaaaaagaagagcttggaaagtcagtatagggttcttttctatcttggtgagggtacatttggcacagttaaattggccttgcacctgaaaacagaggccctggttgccgtaaaaatgatagaggtcaacgagaagaccctcaagggcnntatcctggtagaacaagaaatactggcgacactcaaccatcctaatatcattcgcctcttccaggttatattaacaccaggctgcgtcaacttcatactggagtacgcatcaggagggaacttatttgatttaatacaagagcatggcccactgcaggaggaagaggcaaaacatatattcggacaattagtggcctctgtcaagtattgtcacaaccttaatattgtccatcgagacattaaaccacagaatgtgctcctcgatgaagaaagaaatgtaaagctgacagactttggcctggccataaaatgcaaccctggcagattactgagccggaagtgtgggaccaagaggttttgggcgccagagatactgctaggggagccatacgacagcaggaagacagatgtatggagtcttggtgtgctactattctttatcaccactggggactacccctttgcaggaagtaccttgatagagttcgagcaaaagcttaccacagggagctattgtattccaccttacatctctgttaaactggaaaatctcatacaccagatcctcacagttccccctgagaagaggccatccattgaagacattgagaaacatccttgggtcacgaaatgtgatgtaactgttccgactgatagcttcccagattacaccatcatagagatgctctgtggcatgggttttgaggccaataagatcttagaatccctgcagaagaaaaagtttgatgagaacatggggacatatttgcttttaaaagagcaggtaggcaaagggattgagtatacccctaccccttctcccaaacctgtggatctgtgccctgcgccacccccatcaccagcacatacctctggtcttccccaaaagagaagggccagtgaacccaactttggcctcgtctgcatctggccctcaggacagcagaggcctgctgccctgccactttcaggacaaaagttgaccagaagtgactccatgcctcccattgctctttattttcctgagaagaagagcaccactcctagctgtgccatctataccggagctgtggctgccccatggatctctgacatccttttggaagatgaaacaagcctgccacctgaggaagatgttaccatggaaacatcnnatccccctaagaagattgggttcttcagaagactgcgcaatcgactcaggaattgcctctcaaggctttgttgcatcccccgggctccagagacaaacacccagcgtagatcctccaagaaagtggctcccctgaaagaggtcggatgcagaccccggtga

SEQ ID NO: 19 - DNA, 1479 bp, Mus musculus
  misc_feature (163)..(164): n is a, c, g, or t
  misc_feature (366)..(367): n is a, c, g, or t
atggccagcaactccaaaaagaagagcttggaaagtcagtatagggttcttttctatcttggtgagggtacatttggcacagttaaattggccttgcacctgaaaacagaggccctggttgccgtaaaaatgatagaggtcaacgagaagaccctcaagggcnntatcctggtagaacaagaaatactggcgacactcaaccatcctaatatcattcgcctcttccaggttatattaacaccaggctgcgtcaacttcatactggagtacgcatcaggagggaacttatttgatttaatacaagagcatggcccactgcaggaggaagaggcaaaacatatattcggacaattagtggcctctganntcaagtattgtcacaaccttaatattgtccatcgagacattaaaccacagaatgtgctcctcgatgaagaaagaaatgtaaagctgacagactttggcctggccataaaatgcaaccctggcagattactgagccggaagtgtgggaccaagaggttttgggcgccagagatactgctaggggagccatacgacagcaggaagacagatgtatggagtcttggtgtgctactattctttatcaccactggggactacccctttgcaggaagtaccttgatagagttcgagcaaaagcttaccacagggagctattgtattccaccttacatctctgttaaactggaaaatctcatacaccagatcctcacagttccccctgagaagaggccatccattgaagacattgagaaacatccttgggtcacgaaatgtgatgtaactgttccgactgatagcttcccagattacaccatcatagagatgctctgtggcatgggttttgaggccaataagatcttagaatccctgcagaagaaaaagtttgatgagaacatggggacatatttgcttttaaaagagcaggtaggcaaagggattgagtatacccctaccccttctcccaaacctgtggatctgtgccctgcgccacccccatcaccagcacatacctctggtcttccccaaaagagaagggccagtgaacccaactttggcctcgtctgcatctggccctcaggacagcagaggcctgctgccctgccactttcaggacaaaagttgaccagaagtgactccatgcctcccattgctctttattttcctgagaagaagagcaccactcctagctgtgccatctataccggagctgtggctgccccatggatctctgacatccttttggaagatgaaacaagcctgccacctgaggaagatgttaccatggaaacatctccccctaagaagattgggttcttcagaagactgcgcaatcgactcaggaattgcctctcaaggctttgttgcatcccccgggctccagagacaaacacccagcgtagatcctccaagaaagtggctcccctgaaagaggtcggatgcagaccccggtga

SEQ ID NO: 20 - DNA, 915 bp, Mus musculus
  misc_feature (215)..(216): n is a, c, g, or t
  misc_feature (533)..(534): n is a, c, g, or t
atggtggtgttggacctcaaggttatggctcctaaagaggcacccttcagaaatagttacaggatcttgaacaccatttaccaaggcagctttggcaaaataaaggttgcctgtcacctccttacccagacccaagtggccttgaaagtcctgccaaagaactcttctatttttatgtcagaaattgacatcatgaaatccctcaatcatctaannctttatcagataatcaacactactgtcagcacctaccttgtaatggagcgtatgattggggggggggtgttctatcttcaaagtgagttccaggacagccagggctacacagagaaaccctgtctcgaaaaacaaacaaacaaacaacaacaacaacaacaaggtacagtgcacagagacctaaggccagaagatatcctagcagatggcgagggcaacatcaaattcagtgactttgggtttggcattcaggtgagccctgggaagaagctgcactctttctttgcaacctctcattttgcattccagagctcctnngggggaaaagattatgatgggcctgcagctgccatgtggagcctgggagtcctcttctactttgtgaccacaggctgcttcccttttcaagcacctaccaatcttagtataaagcaaaagatcccacgtgcaaaatactatggcttaccttacctttctgcaaatgtgctaaaagtaatcggccagttactcactctggaccccagcaagagggccataggtattgcatcatgtaccactggtggcttttgcaaagaggagttgtcctttgaattttccttggaggagttcctcagtctcccaaaccccatcatcatgatcatcatggctaatttagggtatgacccatatgaggtctttaaaatcacaaaccttcaataa

SEQ ID NO: 21 - DNA, 1434 bp, Mus musculus
atggacagccacatggaagagaacatccttgaaaaggatttcaggatgttgttatctctgggttgtggttcattcggggaggtaaagcttgcctgccaccttcccacacgtatacgggtggctgtcaaggtccttgagaaaaacatcaacagcatggctgacatcacttcgaaggtggaactccttcaatctttagaacacaggaacattgttcgattttttcacatgattgacacactgacaacaacttatgtgatcatggagtatgtgccaggagaggaccttgagaagtacctcagggcactgggctgtctaaaagaggaagaggctagacctgttttccagcaggtcgtgtcagcagtgtacttcctccaacaaagacacattgcacatcgcaatattaaattagaaaacattctggtcgatgcagcaagaaatgcaaagctttcagactttggcatggcaattaaaaccacagaagggcagatgttggaggagacctgtgactccttactctatagggccccagagatcttggcaaggaaaccctatgatgggctggcagttgacatgtggagcttgggcatcgtcctctatgttctggtcacagggcactttccatatgtagaagccaccattgagtatatgcacaggatcatcactactacaatgtgtcattccattcctaaacacctgtcaattccgtgtcacattatcattgcacggttactcatggtccctacctggtacaggatgacaatacatcagcttgtggaacaaccgtggctgggccacattcaagatcatggactggtatccacaaaagaaatccttcccaggatcgtgaacacaatgtgcaccattggctattcctgtgaagagattgtgtcatccttaacacataggcgactcaaagatgaagtaatggcaacatttaatattttaaaataccaactgagctatgaggacagccatcagcaggtggagaagctctgggcaaatagcagcccttcaggtacccttatcccccttccccacttgaagaggagagccagtgaacctaccttttcaacctgtatagaagctaggaagagtcactttcaggatgagagtgtggaaagaagaagcaagagttccagaagttaccccacactcaccaaaagctcctgcacagagatgatgcccaattcagatgacccagtgccagaaagtgatgctctgacagctgatgtcactaacagtgctaccggggatattgtagtcaacagagattccacagacagcatgcttggtgagcaggtctcttcagtatcagcccctattggccccacagcttctagatctaggtcacccacagtttggaagcaaaattctcgtgctctgaaagcaccatgctgctgctgctgttgctgctgtctgccctccccatggtga

SEQ ID NO: 22 - DNA, 717 bp, Mus musculus
  misc_feature (167)..(168): n is a, c, g, or t
atgtcgagggagctcgaggccagtttccatgaaggggacaccctggcacaggattactacatcttgggtaccctaggtaaagggtcctttgcacgagtcaaattggctctccactttatgacccataccctagtagccatcaagatgttgaaaaggggcaaaaatcnntcagacttcctggttatttctgaaattcaaatcatgaagtctctacaccaccgtcatatattacagcttctacaagtttttcaaaccaggcacaaaacctacctggtgatggaatatgcatcccggggatccctgctgaaatacatcaaaaagcgtcggcctctagatgaggaagaggcatgtaccatgttttcagaactctctttggctgtcaactatatccacagtcagaatattgcccaccaagacatcaaggctgagaacatcctattggattgggatggccatgtaaaactcactgattttggcataagcaaaagactggcctctggggagaaattcaagggattttgtggcacagcacaatattgtgctcctgaagtgttcaatgacacacaatatggtggccttccaagcgacatatggagtcttggaatggtattatacatcggccaccttccctttcaagggacaacgcactccaacataaagtacatgatactatcccagagctggtggattccatatcgcctgtctccagagctttga

SEQ ID NO: 23 - DNA, 1425 bp, Mus musculus
  misc_feature (223)..(225): n is a, c, g, or t
  misc_feature (382)..(384): n is a, c, g, or t
atggccagccacatggaagagaacatccttgaaaaggatttcaggatgttgttatctctgggttgtggttcattcggggaggtaaagcttgcctgccaccttcccacacgtatacgggtggctgtcaaggtccttgagaaaaacatcaacagcatggctgacatcacttcgaaggtggaactccttcaatctttagaacacaggaacattgttcgattttttnnnatgattgacacactgacaacaacttatgtgatcatggagtatgtgccaggagaggaccttgagaagtacctcagggcactgggctgtctaaaagaggaagaggctagacctgttttccagcaggtcgtgtcagcagtgtacttcctccaacaaaagnnnattgcacatcgcaatattaaattagaaaacattctggtcgatgcagcaagaaatgcaaagctttcagactttggcatggcaattaaaaccacagaagggcagatgttggaggagacctgtgactccttactctatagggccccagagatcttggcaaggaaaccctatgatgggctggcagttgacatgtggagcttgggcatcgtcctctatgttctggtcacagggcactttccatatgtagaagccaccattgaggatatgcacaggatcatcactactacaatgtgtcccattccttaccacttgtcatttccgtgtcacatcatcattgcacggttactcggggtccctacctggttcaggatgacaatacatcagcttgtggaacgaccatggctgggccacatccaagatcatggactggttgccacaaaagaaatccttcccaggatcataaacacaatgtgcaccattggctatacctgtgaagagattgtgtcatccttaacaaataggcgactcaaagatgaagtaatggcaacatttaatattttaaaataccaactgagctatggggacagccatcagcaggtggagaagccctgggcaaataacagcctttcaggtgtccttatcccctttccccacttgaagaggagagccagtgaatctaccttttcaacttgtatagaagctaggaagagtcactttcaggatgagaatattgaaagaagaagcaagagttgcataaattcccccatactcacccaaaactgcccagagaggatgcccaattcagatgacccagtgccagaaagtgatgctctgacagctgatgtcactaacagtgctacaggggatattgtagtcaacatagattccacggactgcatgcctggtgagccggtctctccagtatcagactacgttggccccacagcttctaaatctaggtcacttacagtttggaggcgaatttcccgtgctctgaaagcactgtgctgctgctgctgctgctgtctgccctccccacggtga

SEQ ID NO: 24 - DNA, 918 bp, Mus musculus
  misc_feature (301)..(303): n is a, c, g, or t
  misc_feature (724)..(726): n is a, c, g, or t
atcactgactataagatgatgatgaccctgggtgaagaaagcttttcagtagtcaaaatggcctacgatatagcaacattaacctgtgtggctataaaacatctgagaaaagtaaaaagtattaccccacctatcaccagggaaatcagcattatgaagtcccttacccatcctaatattatcaagctgtttcaagtggtccagacaagagagaccaactacctggtgatggagcatgcctcagagggagacctactagaccgaattctggaatgtgggtttttagaggagagcaaggctnnngaatgtttggccagatactataagcagtgtagtattgccaatgacattgtccacagagacataaaggccagtaacattttgattgactactggtggaatgctaagctgtgtgattttggcctggctgctaaagtttttcctggccagaagctggtggatttctgtggcctgctgccctactgtgcgccagaattctttcaagctgaggaatatgaaggctgcccagtcaccatttggagtttaggagtcctcctctttgtcactgagtgcttgcctttcctaggcaggtcatttgccaagctgaggaggcaaatcaccgcagcaaatttcagcattcctcctcatgtttccaccgttattttcaatgttatagttgaaattctgatgatcaatcacagcaggagacccaccatccaccaannnatgttgcaccccatgatcagcaacagccaggtagtttcaccacctacatggactttcccaggttcacgaagctctagcattgtcaagaccatgagagtcatgggttataagcctgaggatatcattgagtctctgatagaccaaaaattcaatgaggtcatgtcaacctatctgattctacaataccagaca

SEQ ID NO: 25 - DNA, 1039 bp, Mus musculus
  misc_feature (139)..(139): n is a, c, g, or t
  misc_feature (247)..(247): n is a, c, g, or t
taacttctaagaagagacagtcttctcttaacagtcttcagatgaagatgtaggactctcatctcctcctgcttcatgcctgccagtatgctgccatagtcttacattggtgataatggactgaactcctgaacatgtnaaggcagcttcaaatgcgtattgtccttaataagagttgccttggtcatggaggctattcacagctaagaattccaaactaagacagttacattggtctttgtattantttttgtctccatttcatcaattcatattctgaacttgattctaattcttttggattttgcttgctctaatatttctatgactgtgacatgcatcattagatcatttggataacttttgtgtttgtattaaggctataaatgtttcttttagacccacttttacttcctatttttcttgcatccctaggtgttgtggacactgaccacaaaacaattgacctatcagcaatgatgaagaggtggcaagcacgtcaggacctcaggtcgaacacctttggcgaacttgccgtaacggagcactataaaatattaacaacccttggccaagggtcattcggggaagtaaaactggcgagccatctactcacaaagataaaggtagcaataaaaatcctcccccaaagcaggagaaacccccttgtgcaatctgaaatcgaaatcatgaaatcccttgaccatccccatattatcaaagttttacacataatcgacaccaccagaaacattttcatcgttctggagcatgctatgggaggagagctgctgagcagaattgaaaagtttggttatatagcagagaaggagtgccacagactgtttagccagatagtgtatgccctcaagtactgtcacaagaaagggattgaccacagaggagatgtaaagcttgctgattttggattgggcaccaagataatcatgggccagaagctggtcgagttctgtggaaccctcccttactgtgccccagaaatgttggaaggtagagggtacgatggctgggccactga

SEQ ID NO: 26 - DNA, 630 bp, Mus musculus
atgactagctacttccaaaataagaaccttgtgagacaatataggatgctttcttccattggccagggtgaatttggcaccataaatctcgcctgccacagaaaaattagggtccttgtgatgataaaatctatagagatctcagagaagtgaatgaaaaggatcctgtctgaaatatcaatattcaagacacttcaccatcctaatatcatatgtctctaccaggtcctactaacatcaaaacatgtacatcttgtgactgagtttgctccaggaggaacgttatttgatatgataatggatgatggcccacttcgaaaagaagaggcaacaaaaatattcaggcagatagtgtcggccataaaatactgccacaattttgacatcatccataaagacattaaaccacaaaacatcatggaggatgaagacggactcatgaagttaatagactttggccttgcaacaaaacagacacctggcaccttattgcatatgaaatgtaggaccaagtgctatgctgccccagagatttttctaggggagccatatgatggcaagaaggcagatgtgtggagtatgggagtactgctctgttttatcaccactgggtattacccaactgtgtga

SEQ ID NO: 27 - DNA, 1155 bp, Mus musculus
  misc_feature (687)..(687): n is a, c, g, or t
atgttatttttttattcatattgcaagtttgattctatacaaaccatggatgatgaaacaggatatgaagcgctgatacaatactgtattgaggagaatgtcactactaattataagatgctaaccaccctgggtgaaggaaacttttcagtggtgaaacaggccttccatatccccacattgacctctgtgactgtaaaaactctccaagacaccaagaagtatacctcagtcatctgcatggaagccaggattatgaagtcccttagccatcctaacaatatcaagctgattcatgtggtccagagaagaaagaccacctacctggtgattgagtatgcctcagagggagagctactagactgaatcttccagttggggtctttagaggagagtgagacttgaaggatgtttgcccagatagtacatgcagtgcagtactgccatggccatcacattgtccacacagacataaaggccagcaacagtttgatcaactacaggaggaccaccaagctgtgtgattttgtcctggctgctaaagtgattcctggacagaagctggttgatttctttggcacactccctgactttgccccagaactcttgaaagcagaggaatttgagggtctccctgtggatatctggagtttagaggtcctcatgttggcagggagcttgccttanaaagactggtcttatgtggaggtgaggtggcagatcataactgtaaacatcagcattccttatgattccattaatattttcaatatcatcatagaaatacttaatatcaatccctgcaggaggctgaccattctccaaatcatgaggcacccaatgatcagggacagggacagtgaagcaggtttaccacctaattccacacagattttcccaggcaccccgagccctagcatggtcaggaccatgagagtcatcggatataagtttgacaggaatacattctcctgcagttcccaagaggagttctctggatctctgcaggcacctaagagtgtaccactcacagactcctcctctggggatacctttcagaaaaaaaaaaccctcatggaggaaaggaacctttcacagaaagaggccatcaaacaggaagaggccatcattcagaatgttgctatcattcagtaa

SEQ ID NO: 28 - DNA, 537 bp, Mus musculus
aactataagatgatgaccactctgagtgaaggaaattttttggtggtaaaactggacttccatgtccccacatttactactgtgtctgcaaaaattctccaaaataccaagtatgccttggtcatcagaagggaagccaggattatgaaatcccttagccatcctaacattatcaagctgtttcatgtggtccagagaagagaggctacctacctggtgatggagtatgcctcagagggagagctacaagatcgcgtcatcaaagtggggtctttagaggagagcgagactcgaaggctgtttgcccagatagtacatgcggtgcagtactgccatggccatcacattgtccacacagacataaaggccagcaacattttgatcgactgcaggggaaatgccaagctgtgtgattttgacttggctgctgaagtgattcctgggcagaagctggccggtttctgtggcacactgcccagaactcctatatgcagaggaatatcagggccccctatggatatctggagttcctcatag

SEQ ID NO: 29 - DNA, 1854 bp, Mus musculus
atgtttctcttagacccacttttacttcctatttttcttgcatccctaggtgttgtggacactgaccacaaaaaaattgacctatcagcaatgatgaagaggtggcaagcatgtcagaacctcaggtccaacacctttggcgaagtagctctaacggagcactataaaatattaacaacccttggccaagggtcatttggggaagtaaaactcgcgagccatctcctgacaaacataaaggtggccataaaaatcctcccccaaagcaggagaaacccccttgtgcaatccgaaatcgaaatcatgaaatcccttgaccatccccatattatcaaagttttacacataatcgacaccaccagaaacattttcatcattctggagcatgctgtgggaggagagctgctgagcagaattgaaaagtttgggtatataggagaaaaggactgccacaggctgtttagccagatagtgtatgccctcaagtactgtcacgagaaagggattgtccacagggacttaaagccagaaaacatcttattggcccacagaggagatgtaaagcttgctgattttggattgggcaccaagataatcatgggccagaagctggtcgagttctgtggaaccctcccttactgtgccccagaaatgctggaaggtagagggtacgatggccgggccactgatgtctggagcttgggggttgtgctttattttatggccacagggcgcctccctttcgagggatatagctatgaagcaacaaagcagaagatctttgcaggaaggtaccctaggagtttcagcctgtcaccagaactttgggatgtgatagacaatttgctgactgtcaaccctggagacaggccaacagtccatgagatcaccagattcaagtggacaaaccatgacaatgaagcttctcccgcttctttgggagagaacactgaaagccacccggaccccagtataatcgtactcatgggtgtcctgggatacaatccaggagagataagagaaagtttgagggagaaaaaattcgacatggtgatggctacttatttattgctacaacaacaacaacaacaacaacaacaacaacagttaccacaggaaaacaagacaacaaaaagaccagatccaaagcctcgtgatagaatgttgaaaaacacagagccaaccataaaaaaccaaacagcagtaaggagggcaactagtatgcctacccattccaccttaagtttgcccaatgagtgggaaagttttgagaagggaaagagaactacaatgagtcactctatgccacccacatggaaatgcttcaagaagcacacaactccactcaacagtatcagcccccagcttgtccagaaggctcaatacatgaggcccatatgggagacagagatcagtgacacctcagaagaaatgtctactggagagtctttggaatatccaaacctcatgggacaggctcactacatgaggcccatatgggagacagagatcagttacacctcagaagaaatgtctactggagagtctttggaatatccaaacctcatgggacaggtccacattatgactagagctgcgtcaatggacatcatgtacacacaagttacatcacctccattctctaggaaggaggccaagggtgagggtcctgctatacaacagagagagtccagaccatcctctacaaatacactccagggacacctccatggcagttgtcagactgcgccccaggccccctttcaaagacgggtctggaagaccataaggaacggatttctaagaggcctgcgaactttatgttgctgcctgcaccaaagcagtgcaccctga

SEQ ID NO: 30 - DNA, 1236 bp, Mus musculus
atgtgtggtccgaagagtgagttgacaggccggtccaccctctcatatgagaacctcagggcacaatataacattttaaagaccataggccagggaagctatgcccaagtgaagctggcccaccaccggcttacgggcacagcggtggcgataaaagtcctgctgaagcagaacatacagaactgcccagtttgcacggaagtgggtataatgaagaggatggaccatccaaacatcatttcgctgcaccaggtcattgaaaccgagcagaatgtctttctgatactggaactggctgatggacatgagctatttgattggatcgtggaaactggcttcctgcatgagggtctagcccggaaaatattccgtcagattgtacatgccatgtgttactgccatgacataggtatagttcacagagacctcaagccggataacatcatggtggattctacaggcaaagtcaaaatcatagactttgggttgggtgccttagtcaagcctggaatgaagctttccagatgttgtggtgccgtactattttatcccccggaaatctttctgggccggccatatgatggcactaaagttgacacatggaccttaggtgtccttctgtattttatggtgactgggaagctgccatttagaggtaaatcctataaagagattgaagccaaggttttgctaggacggtatgatgttccctatcatctctcaaaagagttacgacagattatccgatacttactaactgtaaatcctacagaaagaccaaccctgaagaacattatggagcactcttggcttaggcaaagaaatgcaagttcatcaagccactctcataagatggaccctagctacccagaccctgcaatcatggcagccatggcagctatggggtttgacccacttgatgtccagaaatctttactcaataagctgtataatgaacccatggcaacttatggtctactgcaatgccaggcacgccagcaggatgactacaccagcctacccaagccagtacaaccaggaataacacctttccctactctcacagatcctactaacttccgttgctaccaaaggaggacaactaataatccagccattcgaatctttttttcatcatgctcaaaaactgactcttctaaggcacaaagagcatgtaaagcagaggctaagaagaagtgccactgcacctgtaatactgccccagtgcccacataa

SEQ ID NO: 31 - DNA, 1563 bp, Mus musculus
atgagagtaggagttgaacttgagcgaaacatcatggccagccacatggaagagaacatccttgaaaaggatttcaggatgttgacatctctgggttgtggttcatttggggaggtaaagcttgcctgccaccttcccacacgtatacgggtggctgtcaaggtccttgagaaaaacatcaacagcatggctgagatcacttcggaggtggaactccttcaatctttagaacacagaaacattgttcgattttttcacatgattgacacactgacaacaacttatatgatcatggaatatgtggcaggagaggaccttgagaagtgcctcagggcactgggctgtctgaaagaggaggaggctagacctgttttccagcagattgtgtcagcagttcacttcctccaccaaagacgcattgcacatcgcgatattaaattagaaaacattctggtcgatgcagcaggaaatgcaaagctttgtgactttggcatggccattaaaaccacagaagggcagatgttggaggagacctgtggctctgtattctattgggccccagagatcttggcaaggaaaccctatgatgggctggcagttgacatgtggagcttgggcatcgtcctctatgttctggtcacagggcactttccatatgtagaagccaccattgaggatatgcacagggtcatcactactacaatgtgtcccattccttaccacttgtcatttccgtgtcacatcatcattgcacggttactcatggtccctacctggtacaggatgacaatacatcagcttgtggaacgaccatggctgggccacatccaagatcatggactggttgccacaaaagaaatccttcccaggatcgtgaacacaatgtgcaccattggctatacctgtgaagagattgtgtcatccttaacaaataggcgactcaaagatgaagtaatggcaacatttaatattttaaaataccaactgagttatggggacagccatcagcaggcgaagaagcactgggcaaatagcagcccttcaggtgcccttatcccccttccccacttgaagaggagatccagtgaacctaccttgtcaacctgtacagaagttaggaagagacacttccaggatgtgggtgtggaaagaagaggcaaaagttgcagaaattaccccatgttcatcaaatattcctgcacagagaggatgccctgttcatatgacccagtgccagaaagtgatgctctgacagctgatgtcactaacagtgctacaggggatattgcagtcaacaaagattccatggacagcatgcttggtgagcatgtctctccagtatcagcccaggatgaaacatccacagggtttctgaacatgggcttctatgcagaagaaccattcacatggtcagaaatttccagtgatgagccccatgttggacccatagctcctggatctagatctctcaaggtctggaagcgaatttcctgctcacaaaaaacaatatgctgctgctaccgctgttgctgctgttgctgctgtctccccaccccacggtga

SEQ ID NO: 32 - DNA, 796 bp, Mus musculus
  misc_feature (249)..(250): n is a, c, g, or t
actttctcattgcaaggttggttctagccaagtcatagagggtctgatgatggagcaggatctgaagatgatggagcaggatctgaaggcctgctactcaattgaagagaacttcgacactaactataagatgctgaacacactgggtgaaggaaacttttcagtggtgaaacgggccttccatgtccccacaagtacctctgtggctgtaaaaattctccaaaacaccaaggttaggtacacctcacnncccatctgcagggaagccaggattatgaaatcacttagccatcctaacattatcaagctgtttcatgtggtccagagaagagagactacctacctggtgatggagtatgcctcagagggagagctactagattgcatcatcaacgtggggtctttagaggagagcgagactcgaaggctgtttgctcagatagtacatgcggtgcagtactgccatgaccatcacattgtccatagagacataaaggccagcaacattttgatcgactgcaggggaaatgccaagctgtgtgattttggcttggctgctgaagtgattcctggacaaaagctggcaggtttctgtggcacactgccctactgtgccccggaactcttgcaagcagagaaatatgagggccccccctgtagatatctggagtttaggggtcctcctggttcctcatggtatctgggaacttgcctttccaaaggcaagtcttttgtggacttgaagcaggagatcatctctgcaaacttcaggcatcccttcccatgttcccattga

SEQ ID NO: 33 - DNA, 1431 bp, Mus musculus
atggccagcaactccaaaaagaagagattgggaagtcagtatagggtcctttcctatcttggtgagggtgcatatggcactgtgaaattggccttgcacctgaaaactgaggctctggttgccatcaaaatggtagagatcagtcagaagaccatagacgttatcctggcagaacttgaagtattgaagacactaaaccatcctaatatcattcgcctcttccaagttctattaacatcaagccacgtcaacttcatactggagtacgcatcgggagggagcttattggatttaatagaggagcatggcccactgcaggaggaagaggcaaaaaaaatattcggagagatactggcagctgtcaaatactgccacaacattgatattatccatggagacattaaaccagaaaatatactcattgatgagaagggtaatatgaagttgacagactttggcctggccatcaagctcagccctggcagattactgagccagaggcgtgggaccaagagcttttgggcaccagagctcatgctaggggagccatacaatggcaggaaaacagatatatggagtcttggtgtgctactctattttatcaccactgggcactacccctttgccggaatcaccttcaaagagatcaagaataagattaccacagggtcctatcgtattccatcttacacctctgttaaactggaaaatctcattcaccagatcctcacagttacccctgagaagaggccctccattgaagacattgagagacatccgtgggtcagaaaatgtgatgtaactgttccaactgatagcttcccagattacaccatcatagacatgctctgtggcatggggtttgatgccaataagatcttagaatccctgcagaagaaaaagtttgatgagaacatggggacatatttgcttttaaaagagcaggtaggcaaagggattaaacatacatctacattttcacctaagtatgtggatccctgccccgtgccacccccatcaccagcacatacctctacctctggtcttccccgaaaaagaaggggcagtgaacccaactttggcctcctccacatatggccctcaggacaacaggggcctgctgccctgccactatcaggacacaagttggccagaagtgtctccatgcctcccattgctcttcattttcctgagaggaagagcatcactcctagctgtgccctccatactggagctgtggctgcccagtcggtctgcaacatcatattggaagacgaaacatgcctgccacctgaggaagacgttaccatggaaacatcatctcccccctctgaagattgggttcttcagaagactgcgcaatcgactcaggaattgcctcgcaaggctttgttgcatcccccgggctccagagacaaacacagagcgtag

SEQ ID NO: 34 - DNA, 1545 bp, Mus musculus
atgttattttcaggtaccactagtagtgattcaatgcctgcacatattgaagaggagttaccacctcccagccctcagctgattaagcctgaggatggagagttgtactcccaatataatgttgtaagaactatcgggcataggacttatgccaaggtcctcctggcccagcaccggctcacaggcacacccgtggctgtcaaagttcttgtaaagaacaagccctggttccagccaggcatgaaggaggccaatttaatgaaaaagatcaaacaccccaatattgtctcccttctccaagtgattgagaccaaatcaagaggatacctcatcatggaactggttgaaggccaagaactttatgaatacatcaaaaattctggccacatagaggaggacgaagcccgacaaatatttttacaaatactgtcggcagtgagctactgccacagacatgggatagtgcatagggacttaaaacctgataatatcatgatagataacaaggggaacaccaaaataatcgactttgggcttagtacccaagtcaaagccggagatttgttggatgagccctgtggtgcttacgcttttggtgctcctgagttattcctctgggaaagatatgatggaagaaaaagtgacctgtgggcgttaggagtgatattgtattacatggttgttggaaaggtcccattcgactcggtcaccatacctgagctggcaggtgtataccctgccccctgtggggtgtccgacgagctggaggacctgttgagcctcctaatgacagtaaaccccaaatataggccgacagtcacagaagtaatgaagcatccctggctaaaaggccactggaaaggattaaaaaatatccatgaggaaccgttccctgtcagaccagatcctgacattgtagatgcgattcagtatattgggttccaagcaaaagatattagagaatcactcactaaagaaaaatttaatgaagtgtcggctgcatattatttattggaaaggcaggctctccagagggaagtccgctcaacccaggctccaacagtgagtcaagttaaggccccattcccttccatggatgctggtgctgcttcgtgtttaaaaattaagaggagtggaagtgctcccatccttggcagatcggtctgtccatcctccattggtcgagtgccagcctatggccagaaggttaggcaaagagcaggcagaagatccactgggcatggtctggtcttccggccaaaccagatgacacccacacaggaccaacaccacatacgtgccatgagtgtcccctgcatgctttcaccaagcagcataagtgaagagagcgtcagtgagaagagagaagagaatctctcccacagtgccctagcagaggataagcccatctgcagcaggggctgtcgcagaggcatcatgcgatggacaaggagggtggggaatgccatcaggacgctgtgttgctgcattccatcaagaaaaaaacctcggctggggcagagcagagtctctccccagaaatga

SEQ ID NO: 35 - DNA, 966 bp, Mus musculus
atggccagccacatggaagagaacatccttgaaaaggatttcaggatgttgtcatctctgggttgtggttcattcggggaggtaaagcttgcctgccatcttcccacacttatacgggtggctgtcaaggtccttgagaaaaacatcaacagcatggctgacatcacttcgaagctggaactccttcaatctttagaacacaggaacattgtttgattttttcacatgattgacacactgacaacaacttatgtgatcatggagaatgtggcaggagaggaccttgagaagtacctcagggcactgggctgtctgaaagaggaggaggctagacctgtttttcagcaggtcgtgtcagcagttcacttcctccaccaaagacacattgcacatcgcaatattaaattagaaagcattctggtcgatgcagcaggaaatgcaaagctttgtgactttggcatggcaattaaaaccacagaagggcagatgttggaggaaacctgtggctccttactctatagggccccagagatcttggcaaggaaaccctatgatgggctggcagttgacatgtggagcttaggcatcgtcctctatgttctggtcacagggcactttccatatgtagaagccaccattgaggatatgcacagggtcatcactactacagtgtgtcccattccttaccacttgtcatttccgtgtcacatcatcattgcatggttacttggggtccctacctggcacaggatgacaatacatcagcttgtggaacgaccgtggctgggccacattcaagaccatggactggttgccacaaaagaaatccttcccaggatcgtgaacacaatgtgcaccattggctatacctgtgaagagattgtgtcatccttaacaaataggtgactcaaagatgaagtaatggcaacatttaatattttaaaataccagctgagctatggggac

SEQ ID NO: 36 - DNA, 4933 bp, Mus musculus
atggaaggggcggcagtgtccgcggcaggggatggccctgctgtagagaccggcttgccgggctctccgctggaggcggtggccggggcgactgcagccccagtggagcccaggaagccgcacggggtgaagcgacatcaccacaaacacaacttgaagcatcgctatgagctgcaagagaccctgggcaaaggtacctacggcaaagtcaagagagccaccgagaggttttcaggccgagtggttgctataaaatccatccgtaaggacaaaattaaggacgagctagacatggttcacatcagacgagagattgagatcatgtcatccctcaaccatcctcatatcatcagtatttatgaagtgtttgagaacaaagataagattgtgatcatcatggaatatgccagcaaaggagagctgtatgattacatcagtgagcgcaggcgcctcagcgagagggagaccagacacttcttccggcagattgtgtctgccgtgcattactgtcacaagaatggtgtggtccaccgggacttgaagctggagaacatactgcttgatgacaactgcaacattaagattgctgactttgggctctccaacctgtaccagaaggacaagttcttgcaaacattttgtgggagcccactctatgcgtcgcccgagattgtcaacggcaggccttaccgagggccagaggtggacagctgggccctgggtgtcttgctttacactctcatttatggaacgatgcccttcgatggctttgatcacaaaaacctcatccggcagatcagcagcggagagtaccgggagcccacacaaccctcagatgctcggggactcatccggtggatgctgatggtgaatcccgatcgcagagccaccatcgaggacatcgccaaccattggtgggtgaactggggctacaagagcagcgtctgtgactgtgatgcccttcctgactctgagtctccactcttggcacggatcatcgattggcatcaccgttccacggggctgcaggctgaggctgaagccaagatgaagggtctggccaaacccggggcctctgaggttgtgttggagcggcagcggtcactgaagaagtccaagaaagagaacgactttccccagtctggccaggactccgtacctgaaagcccatccaagctgagttccaagaggcccaagggcatcctgaagaaacggagcaacagcgaacaccgctcccacagcactggctttatcgaaggcattgtgagccctgccttaccatcccctttcaaaatggagcaagatttgtgccggactgccatccccctccccagctcccccgaggcagatatgtcagggaagctcagcctcaaacagtctgccacgatgcccaagaaaggcatcttgaaaaagacccagcagagagaatctggctactattcatccccagagcgcagcgagtcctcggaactgctggacagcaacgatgtggtcatcagtggtggcctctcgtcccctcccccagacccagccaggggaacttcccacagcctgtcctgccggaggaagggcatcttaaaacatagtagcaggtactcagatggtggcacagaccctgccctcacccgccctgaaatgcccacactggaatccttgtcacctcccggtgtcccctccgatggcatctctcggagctacagtcgcccgtccagtatcatcagtgatgacagtgtcctgtccagcgactctttcgacttgttagagcttcaagagaaccggccagcccgccagcgcatccgcagctgcgtctctgctgaaaacttcctccagcttcaggactttgagacaccacacaaccggccccggccccagtacctgaagcggctggcagacagtagcttctcccttctcactgatatggacgatgtgactcaggtgtataagaaagcgctggagatctgcagcaagctcaactagcccttcagggcacagaggatgggatgggtgggtgggtgaggccaagggagaaggggaacagaactcagcctgaaggctggttacctctttgctggtcaaggcaacggattgggaaaggactagtaatgtctggcctggccagtttacacagccttgagtcagcacctaaaagggatagaaaccattctttaccagttctgcctgtgccagttagaatgggggtcctaactggcattcccaggtgacatctcacgggggaggtggtgttggccagcaagaaatgggaagcggcattatggggaagggtgtgtttcctagaagtcatctagatgtttctggaggaggggaagaaagactgagaccatctgctttggatggatccattagcaagcctggtctgactacacaggggctagcaagactccagcaacctgagtgtgaattggtgatcaattggtaatgtctgtactgtggtctgagtttagtagactaggcacaccagggagcattgagtgagtaccaataactgccagggaatcaggaccggaggcaacagcatacctgccctggctaagccctgggagttaggttaaagcaggctgttttaaagaaaaacagttaactctttcatggcacagcatgacatgtgttaatttgctcctggaccttgagtagaagacagggcttgcttagagagtgaatatgctgaactctgctaccgaaataagtctggtggtggtgactttctggttttctgggatctgcctcttctttctcctctctcttgccttgttcttctttagtgggatcttctgaaggtgagcaggaataaagatggcagtgtgagagcccagggctttgtgtgtaatggggcacagagctgctggggcctttgctcagtgaatggactgacggtgaagcatgccagcaaggggcgacttaacactttcttaaatatctcagtattaactggaaccccgcctcttggcttctcacctgcacaaggacaggatgctactctgagtctccaaagcatcactggctcagccataggccccattcaccccaagtgtggaatcttgactgtagaagagttgcttctagggagttagtatgtaggtgaaatatgtggccgagggaaagcccagtttgacagaaggttcttgtctcgccaggccttagtattctgcctcgtggttttgatctccctcattttgggggaataaacaagttccattcatccatccttccatccatccatccatccatccatccatccatccacagaataagatgttgagagagcagagtgtggggggaggaggcttagggacgtttcctcgggagccatccagatggctctggaggaggcagaaaggaggtgtatggggtgacaggatgcttaaaaatgttccagctagttatctaatctctgaacactaagattacaggtgatgtcatcccctcagaggggaccctggggacactgggggcgggggtgggggggattgaagtggtctttctgggctgaccacggaatccactggcttagtcaaattagaatccttcttctaaggtggctgccttgtgggagcctctcagacagggttgggggaggatgcatccgtcactgcactgaggacagttgtcagggagatgctgctctatacagcagaaggctgctttgcatcactgtgtttgggccccgcgctttcctttgggctgaagtgagcaggatgtagtgggaagctgcttcgattcttttccttcagtttcacctcctacctgaactgtggcaggggctaaaagggaggaaaatctataggtagagaagtggctctggcgcttggaggtgtatagacggcagcatgtaacctctgaatcctcccgctccctgcctcctctcgtgaacaaccccgcctgctgctacactgctggcccctgagcaggcagctggtctcgggtgtagcagccattgctggttgatggaatttttcccttttgccagctgattgtgtctgtttagtattccccaccatgcagttgactccattaggaaaaccacgcccttcggctttctccccttctcgatcaccagggtcaccagtgtgttctcttttggcgggactctcaaagacaaggggttggggaggggaaaccaaatgtttcacaccaagaacagaggctctcgggtgtggggtgtgtcctccgttccagggctgacactgagttgagtccaggtctgccttgatctggaggtctcaggcacctgcagtggctatgagggctgcttcccacgggtggaggctggagacgtggctgagtggtttcccaaggccctccccgcccccctcagttctgatacctgcttctagctgagatgctgactgtccctgcaggaaatgagttagatcagagaataaagccctaaaaaaagcagtttcccaatggagccctgttatccctgccagtcagtccccagccaaagaagggatgcctgactcatttccgcggagtccccagtgagagacacagatgaccccatgggcagagtgggaaagtcgctgcgtgagctgtcctcgtccttcctttgcttctagggcacttctattcttcgtttacacatctgccaaagggggtggagttgtacttcgttttacaggtaaatttcaaggcacagtcagtttttaagaaagtgctccaagaccctaggcaacgtgacagttctcagttccctctgaattttagtctctgctacctggtgctctttaccaaaggagctcgctgcagggtgaaattcaggcgtgttctgcccaggcctgctgtcttgagtacaaatgtgaatgatggactgactgcttgttgccaaactggaaatgttttgtagggatttactggcatggtatcattcctaggaagaagaagaaaaaaaaaaaaaaaaaaaaaaaaaaaaaaa

SEQ ID NO: 37 - DNA, 4094 bp, Mus musculus
ccgtggccggagcagggggagccgggccggccggccgcctgctgcctccgcccgccgcggggcccccggcagcccccgccgcagtgcccccggccgccgtcccggcgcgtcccacagccccggcctcccgcgggtcgatggccgctcgcatcggctactacgagatcgaccgcaccatcggcaagggcaacttcgctgtggtcaagcgggccacgcacctcgtcaccaaggccaaggttgctattaaaatcatagataagagccagctggatgaagaaaacttgaagaagattttccgggaggttcagataatgaagatgctttgccatccacacatcatcagactctaccaggtcatggagacagagcgcatgatttacctggtgacagaatacgctagcggaggggagatatttgaccacttggtagcccatggaagaatggcagagaaggaagctcgacggaagttcaaacagatcgtcacagcggtgtatttttgtcactgtcggaatatcgttcatcgtgatttaaaagccgaaaacttacttctggacgccaatctgaatatcaaaatagcagactttggcttcagcaacctcttcactccagggcagctgctgaagacgtggtgtggcagccctccctatgccgccccagagctcttcgaagggaaggaatatgatgggcccaaagtggacatatggagccttggagttgtcctctatgtgctggtgtgtggcgccctgccgtttgatgggagcacactgcagaatctgcgggcccgcgtgctgagtggcaagttccgcatcccgttctttatgtccacagagtgtgagcacttgatccgccacatgctggtgttagatccaaataagcgcctctcaatggaacagatctgcaggcacaagtggatgaagctcggagatgcagaccccaactttgacaggttaatagcggagtgccagcaactgaaggaggaaaggcagtcggaccccctcaacgatgatgtcctcttggctatggaagacatggggctggacaaggagcgcacacttcagtcattaaggtcagatgcctatgaccactatagtgcaatctacagcctgctgtgcgatcgacacaagaaacataaaactctgcgtcccggagcacttcccagcatgccccaagccatgactttccaggcaccagtcaatctccaggcggagcagacaggcactgctatgaaccttagcgtccctcaagttcagctgatcaacccagagaaccaaattatagagcctgacggggctgtgaacttggacagtgatgagggtgaagagccttctccagaagccttggttcgctatttgtcaatgaggaggcacacggtgggagtggctgacccacgcacggaagttatggaagatctgcagaagctgctgcctggctttcctggagtaaacccacagggtccattcctacaagtggcccctaacatgaacttcacgcacaacctgttgcccatgcagagtctgcagccaactgggcagcttgagtacaaggaacagtctctgttacagccgcctacactacagctactgaacggaatggggccccttggccggagagcctcagatggaggcgccaacatccaactgcatgcccagcagctgctcaagcgcccacggggaccgtccccacttgtcaccatgacaccagcagtgccagcagttacccctgtggatgaggagagctcggatggggagccagatcaggaagctgtgcagaggtacttggcaaataggtccaaaaggcacacactggccatgaccagcccgacagctgagatcccaccggacctgcaacggcagctaggacaacagtctttccgttcccgggtctggcctcctcacctggtacctgaccagcatcgctccacctacaaggactccaacaccctgcatctccctacggagcgtttctcccccgtgcgccggttctcagacggggctgcaagcatccaggccttcaaagctcacctggaaaaaatgggcaacagcagcagcatcaagcagttgcagcaggagtgtgagcagctgcagaagatgtacggggggcaggtggatgagaggaccctggagaagacccagcagcagcatatgttgtaccagcaggagcagcaccatcagatcctccagcagcaaatccaagattctatttgtcctcctcagccctccccacctcttcaggttgcctgtgaaaaccaaccagccctcctcacccaccagctccagaggttaaggattcaaccttcaagcccaccccccaaccatcccagcaaccatctcttcagacagccaagtaacagtcctcccccggtcagcagtgccatgatcacgtctcacggtgctacgtctccctcccagtttcaaggcttaccctcccatggtgcaatcttccagcagcaacccgagaactgttccccgcctcccagtgtagcactaacctgcctgggcctacagcaggctagccagtcacagccagtgactatccagctacaggagccagttgacatgctcagcaacatggccggaaccgcggcaggctctgcagggcggagcatccccatcagccccagcgccagtcagattcagatacagcaccgagccagcctaatggctcccttcagctatgggcaccggcccttgtccaagcagctgagcgctgacagtgcagaggcccacagcttgaacatgaatcggttctcccctgccaactacgaccaggcgcatttacacccccatctgttttcggaccagtcccgaggttcccccagcagctacagcccttcaacaggagtggggtttcctccaactcaagccctgaaagttcctccgcttgaccagttccccactttccctcccagtgcccagcagcagccaccccactataccacgtcagcactacagcaggccctgctatctcctacaccgccagactatccccgacaccagcaggttccccatatccttcaaggactgctctctccccggcattcactcaccggccactcggacattcggctgcctccggcagagtttgcacagctcatcaaaaggcagcaacagcatcgacagcagcagcagcagcagcagcagcaacaagaataccatgaattgttcaggcacatgaaccaaggggatgctgttagcctagctcccagcctcgggggacagaatatgacagagcaacaggctttatcttatcaaaatgctgactcgtaccaccgccaccacaccagcccccagcatatcttacagatcagggcgcaagattgtatctcacagggtccctcgcccacccccacccatggctatgcccatcagccaccactaatgcattcggagagtatggaggaagactgcttgtgtgaggggctcaaggagggcttcccagacaagagctcaagcacactgaccaaaggttgccacaacagccctctgctcttgtgtaccagtgggcctggggaccctgagcctttgctgggaactgtgagtcaggcccgggagctggggatccatccctacggacaccagccaactgccaccacgttcagtagaaataaggtgcccagccgagagtctgtcctagggaactgcctggaaagaagttctcctggacaagcaatggagctgccggatcacaacggccttgggtacccagtacggcccttagtcagtgagcacctcaggtcccggacgctccagagacaccacacgatccagaacagcgacgatgcctatgtacagctggataccttgccaggaatgagcctggtggcaggcaaggcgctgagctctgcccggatgtcagatgcagttcttagtcagtcttcactcatgggcagccaacagtttcaggatgaggaagatgaagaatgtggggtgagcctgggccacgagcatccaggcctgggtgatggcagccagcatctcaactcctctcgctatccagctacgtgtgttacagacatcatgctcagccacaagcacccagaggtctccttcagcatggagcaagccggcgtgtagcaagatatggaaagtgagtgc

SEQ ID NO: 38 - DNA, 2382 bp, Mus musculus
gcgcatcagtgcactagcggtcgcagcttccagacgctcgtgctccgcagccccagccgcgcccagcccggcgaggacagctccagcagccggccacagacaacccagcctccacccgcgaccggttccataagcaagccagccatgtcgttcggcagagatatggagttggagcattttgatgagcgggacaaggcgcagaggtacagcagggggtcccgtgtgaatggcctgcccagccccacacacagcgcccactgcagcttctaccgcacccgcaccctgcagacactcagctccgagaagaaagccaagaaggttcgattctacagaaatggtgaccgctacttcaaaggaattgtgtatgccatctccccagaccgcttcagatctttcgaggccctgctggctgatttgacccgaactctctcggataatgtgaatttgccccagggggtgagaaccatctacaccatcgatggactcaagaagatctccagcctggaccagctggtggaaggtgaaagctatgtctgcggctccatcgagccctttaagaagctggagtacaccaagaatgtgaaccccaactggtcagtgaacgtcaagaccacctcagcctcccgcgcagtgtcttctttggccactgccaagggtgggccttcggaggttcgggagaataaggatttcattcgacccaagctggtcaccatcatcagaagtggggtgaagccacggaaggctgtcagaatcctgctgaacaagaagacggctcactccttcgagcaggttctcactgacattaccgacgctatcaagctggactccggtgtggtgaagcgcctgtacactctggatgggaagcaggtgatgtgccttcaggacttttttggtgacgatgacatttttattgcatgtggaccagagaagttccgttaccaggatgatttcttgctagatgaaagtgaatgtcgagtggtgaaatcaacttcttacaccaaaatagcatcagcgtcccgcagaggcacaaccaagagcccaggaccttcccggagaagcaagtccccagcctccaccagctcagttaatggaacccctggtagtcagctctctactccacgctcgggcaagtcaccaagtccatcacccaccagcccaggaagcctgcggaagcagaggatctctcagcatggcggctcctcgacttcactttcatccactaaagtttgcagctcaatggatgagaatgatggccctggggaaggtgatgagcttgggagaaggcacagcttgcagaggggatggaggagggaagagtctgaggaaggcttccagattcctgccacaataacagagagatacaaagtcgggagaacaataggagacggaaattttgctgttgtcaaggaatgtatagagaggtcgactgctcgggagtatgccctgaaaatcatcaagaaaagcaaatgccgaggcaaagagcacatgatccagaacgaggtctccatcctacggagggtgaagcaccccaacattgtcctcctgattgaagagatggatgtgccgactgaactgtatcttgtaatggaattagtgaagggtggagaccttttcgatgccatcacctccactagcaaatacacagagagagatgccagcgggatgctgtacaacctggccagcgccatcaaatacctgcacagcctgaacatcgtccaccgtgacatcaagccagagaatctgctggtgtatgagcaccaggatggcagtaagtcactcaagttgggtgactttggcctggccacaattgtcgacggccccctgtacacagtctgtggcaccccaacatatgtggctccagaaatcattgcagagactggatatggcctcaaggtggacatctgggcagctggcgtgatcacttatatcctgctgtgtggcttccctccgttccgtggaagtggggatgaccaggaggtgctttttgaccagatcttgatgggccaagtggactttccatctccgtattgggacaatgtgtcagattctgctaaggagctcatcaacatgatgctgttggttaacgtggaccagagattttcagccgtgcaggtccttgagcatccctgggttaatgatgatggtctcccagaaaatgagcatcagctgtcagtagctggcaaaatcaagaagcatttcaacacaggccccaagccgagcagcactgcagcaggagtttctgtaatagcactggaccacgggtttaccatcaagagatcagggtctttggactactaccaacaaccaggaatgtattggataagaccaccgctcttgataaggagaggcaggttttccgacgaagacgcaaccaggatgtga

SEQ ID NO: 39 - DNA, 2682 bp, Mus musculus
ggcggtggtggcggcggtggcggcggcggcggcggcgacggcggcggcggcggcggcggcagcagcagcggtggctgtggcggcgctgttccccgcgcagtcctcggagcggggtccgggctgtgctaggtgaggtgacggcgctgcgaccccggccggtgtccgaccccgggtcgcctcccaagccgccccccgggccccgcgtcccctcccccgctggtggggcccggactgaagatggtgcagaagagaacagccgaacttcagggcttccaccgttcgttcaaggggcagaatcctttcgagttggccttctccttagacctcgcccagcacagggactctgacttcagcccacagtgtgaagcccgacctgacatgccttccagccagcccattgacatcccagatgccaagaagagaggccggaaaaagaagcgctgtcgggctactgacagcttctcaggcaggttcgaagatgtctatcagctgcaggaggatgtgctgggggaaggtgctcacgctcgtgtgcagacctgtgtcaatctcatcaccaaccaggaatatgctgtcaagatcattgagaagcagctgggccacatccgcagcagggtgttccgggaggtggagatgctgtaccagtgccagggacataggaatgttctagaactgattgagttctttgaggaggaggaccgtttctacctggtgtttgagaagatgcgtggcggatccatcctaagccacatccatagaaggcgccactttaacgagctggaggccagcgtggtagtacaggacgtggccagtgccctggacttcctgcataacaaaggcatcgcccacagggacctaaagccagagaacatcctatgtgagcaccccaaccaggtctcgccagtgaagatctgcgacttcgaccttggcagtggtatcaaactcaatggagactgctcccccatctccacaccagagctgctcaccccgtgtgggtcagctgagtacatggccccagaggtggtggaggccttcagtgaagaggccagcatctacgacaagcgctgcgacctgtggagcctgggcgtcatcctctacatcctgcttagtggctacccgcccttcgtgggccactgtggcagcgactgtggctgggaccgtggggaggcctgtcctgcctgccagaacatgctgtttgagagcatccaggagggcaagtatgagttccctgacaaggactggtcccacatctcctttgctgccaaagacctcatctccaagctgctggtccgagatgccaagcagaggctgagtgctgcccaagtcctgcagcatccctgggtgcaggggtgtgccccagagaacaccctaccgacacccttggttctgcagaggaacagctgtgccaaagacctcacgtcctttgcggctgaggccatcgccatgaaccggcagctggcccagtgtgaggaggacgctgggcaggaccagcctgtggtcatccgagctacctcacgctgcctgcagctgtccccaccctcccagtccaagctggcccagcggcgccagagggctagcctgtcggccacccctgtggtccttgtgggggatcgcgcatgacccccactagctccttgtacatatgcccctgccccgcggggcctgaaggctagggacctggacaccccaccccttgccattccaggtgccagctcagctgggtcctctgggggtgtaggggtctgttagggggtgtctccttttctccctgtccttctcctgccctgcccacttggttttgtttcgtttgtttccctttgccgctattgaaagcaagtgcccggaggagggcggagggttcaggccgcccagcctgcaccccacgatgctcaacctgccaactgtgaaggtcctgccacctgcgcccccacctccactccagccactctgctgtcttccagggttggggatcccgcagggtcagcaccccacacctctcccagccctcagtgttgtcagggacaggccctcctggtgagcacagtggtggttgcatctcctcaccagagcacccttgggtctggggtagggcagggctccctgtcttggatagagacctctggggagcaggtggatggggacagtgcacttgattgaccccgagtccccatcatccacctgcagtgtcccttggagggttgacaatcagaaacccctcccaggctgcttagctccttgccctgggacagacctactgctcccaaccccacttcccaggggcagagctggaaggggaccctgcacccagctagctccaccacagcaggagaggtgctggaccaggctttcatcagcaaacatggggctcccacatgtctccccacccagggcacctgagtgccccttctcagggctcagcctgaccacggccacgtcctgcccctggggttcctaagctctcctagctgcttctgttagccagagctgaggccatacccagggctctcaccttcctgttgcccccagagggcagcagttcaggcgtgcctgctttcaggaaagggaggctgggaagggatgtggtggccctgcggtgtccagacctaactgcccgaggcctgtagactgtactagccgaactactatgcaatacgagttcccattttctccatggccctgctggtc

SEQ ID NO: 40 - DNA, 5984 bp, Mus musculus
agaggggaactcgtgtctctgcctgggtttccaagagagcctttatgtgaaagcatgtctggccagttacctgggaagaccatgggggacgtgaaactgtttgcctcgtcacacatgtctaaaacctcccacagtgtggatccctcgaaggtcagctccatgcctctcaccgaggccccagctttcattctgccccctcggaacctctgcgtcaaagaaggagccacagccaagttcgaagggagggtccggggctacccagagccccaggtgacatggcacagaaaagggcaagccatcaccaatggtggccgcttcctgctggactgtggagtgcgggggacttttagtcttgtcatccacactgtccgcgaggaggacaagggcaaatacacctgtgaagctagcaatggcagtggcgcccgccaggtgaccgtggagctgactgtggaagggaattctatgaagaagcgtgatcagcctgttctttctaaagcctcaggatttccaggggagactcgtcctagcatctggggtgagtgcccaccaaagtttgccaccaagctgggcagagctgtggtcaaagaagggcagatggggcgattctcctgcaagatcactggccggcctccaccacaggtcacctggctcaagggaaatgtcccgttgcagccaagtgcccgtgtgtcaatgtcagagaagaatggcatgcagatcctggagatccgtggggtcactcgggatgacctgggcgtgtacacctgcatggtggtgaatgggtcagggaaagcctccatgtcggcggagctctccatcccaggtttggacaatgccgctaggttggctgtgagaggaaccaaagcccccagtccagacatcaggaaggaggtgaccaatggagtctccaaagacccagagactgtggctgaaagtaagaactgtccaagtccccagaggagtggctcctcagcccgggccaccaacagtcacctcaagtccccgcaggagcccaagccaaagctgtgtgaggatgctcccagaaaggtcccgcagtcctccatcctgcagaagtccaccagcaccatcactctgcaggccttgaaagtccagccagaagcgagagtaccagccatagggtccttctctcctggggaagacaggaagagtctggctgcccctcagcaagccacactccctaccagacagtctagcctgggaggttccgttgggaacaagtttgttaccgggaacatccccagagagagccaaagggagtcaacattccccagatttgagagtcagccccaaagccaggaagtcactgaaggtcagacagtcaagttcatctgcgaggtttcaggtataccaaagcctgacgtgggctggttcctggaaggcatccccgtgaggagacgggaaggcatcactgaggtttatgaagatggtgtatcccatcacctgtgcctgctgagagcccggacgagagacagtgggaggtacagctgcacagcatccaatagccttggccaggtgtcctgcagctggagcctgctggtggaccggccgaacttggcacagacagccccttcattctctagtgttctgaaggacagtgttgtcattgagggccaggattttgtgctacggtgctcagtgcaggggactccagcaccccgggtcacgtggctgctcaatggacagcccatccagtttgctcactccatctgtgaggcaggcgtggctgagctccacatccaggatgccctgccagaggaccgtggcacctacacctgcctggctgagaatgccatggggcaggtgtcctgcagcgccactgtcaccgtccaagagaagaaaggtgaaggagagagggaacaccgtctgtccccagctcgcagcaagcccatcgcacccatcttcctgcagggcctctccgacctcaaagtcatggatggaagccaggtcactatgacagtccaggtgtcagggaacccacctccggaagtcatctggcttcacgacgggaatgagattcaggagtccgaggacttccacttcgagcagaagggtggctggcacagcctgtgtatccaggaggtgttcccggaggacacgggcacgtacacctgtgaggcctggaacagtgccggggaggtccgcacccgggccgtcctcaccgtgcaagagcctcatgatggcacccagccctggttcatcagcaagcctcgttcggtgacagccaccctgggccagagtgtcctcatctcctgcgccatagctggagacccctttcccaccgtgcactggctccgggatggcagagccctctccaaggacagtggccactttgagctgctccagaatgaggacgtgttcaccctggttctaaagaacgtgcagccctggcatgccggccagtatgagattctgctcaagaaccgggttggcgagtgtagttgccaagtgtcactgatgcttcacaacagcccttccagagccccaccacgggggcgggagcctgccagctgcgagggcctctgtggtggtggaggagttggtgctcatggtgatggtgaccgtcatgggaccctgaggccctgctggccagcaagagggcaaggttggcctgaggaggaagacggagaagacgtgagggggctgttgaagagacgggtggagaccaggctgcacacagaagaggccatccgccagcaggaggtggggcagctggattttcgagacctcctgggaaagaaggtgagcaccaagaccgtctcagaagacgacctgaaggacatcccagccgagcagatggatttccgcgccaaccttcagcggcaagtgaagccaaagaccatatccgaggaagagaggaaggtgcatagccctcagcaggttgacttccggtctgtcctcgccaagaaggggacccctaagacccccgttcctgagaaggcacctccaaaagctgccaccccagactttcgctctgtgctaggtggcaagaagaagtcaccctcggagaatgggggcaacagcgctgaggtcttgaatgtcaaggctggggaaagccccacacctgcaggcgatgcgcaggccatcggggccctgaaacccgtaggcaatgccaagcctgctgagaccccgaaacctataggtaatgccaagcctaccgagaccctgaagcctgtgggcaacaccaagcctgccgagaccctgaaacccatagccaacgcacagccttcagggtccctgaaacctgtaaccaacgcacaacctgctgagccccagaagcctgtgggcaatgccaagtctgctgagacctcgaaaccagctgggaaagaagaagtcaaggaggtaaagaatgatgtgaactgtaagaaagggcaggtcggagccacgggcaatgaaaagcgacccgagagccaaggctcggccccagttttcaaggaaaagctacaagatgtccatgtggcagagggggagaagctgctactccaatgccaggtgatctctgatccccccgccactgtcacctggtcgctgaatgggaagacactcaagaccacaaaattcatcgtcctcgcccaagaaggctcacgtttctctgtctccatcgagaaggcactgcctgaggaccgaggtttgtacaagtgtgtagccaagaacagcgctggccaggcagagtgttcctgccaagtcactgtggacgatgctcagaccagtgagaacaccaaggccccggagatgaaatcccggagacccaagagctctcttccccctgtgctaggaacagagagcgacgcaactgtgaaaaagaaacctgcccccaagacacccacaaaagcagctatgccccctcaaatcatccagttccccgaggaccagaaggtgcgcgcaggagaacctgtggagctgtttgggaaagtggctggcacccagcccatcacctgcaagtggatgaagttccgaaagcagatccaggagagcgagcatatcaaggtggagaatggcgagagcggcagcaagctcaccatcctggccgcgcggcaggagcactgtggctgctacacactggtggtggagaacaagctgggcagcaggcaggcccaagtcaacctcacggtcgtggataagccagaccccccggctggcacaccttgtgcttctgacattcggagttcctcactgaccctgtcctggtatggctcctcatatgatgggggcagtgctgtacagtcctacaatgtggagatctgggacacagaggacaaggtgtggaaagagctagccacgtgccgcagcacctcttttaatgtccaagacctgctgcctgaccgcgagtacaaattccgagtgcgtgcagtcaacgtctatggaaccagcgagccaagccaagagtccgagctcacagctgtgggagagaaacctgaagagccaaaggatgaagtggaagtgtccgatgatgacgaaaaggaacctgaggttgattaccggacggtgactgttaacactgaacagaaagtgtctgatgtgtatgacattgaagagcgactaggatctgggaagtttggacaagtcttccgacttgtggaaaagaaaactggaaaaatctgggcagggaaatttttcaaggcctattccgccaaggagaaagacaacatccgtcaggagatcagcatcatgaactgcctccaccaccccaagctggtccagtgtgtggatgccttcgaagaaaaggccaacattgtcatggttctggagatcgtgtccgggggtgagctgtttgagcgtatcattgacgaggacttcgagctgacggagcgggagtgtatcaagtacatgaggcagatctcggaaggggtggagtacatccacaagcagggcattgtgcacctggacctcaagcccgagaacatcatgtgtgtcaacaagacaggcaccaggatcaagctcattgacttcggcctggcacggagactcgagaacgctgggtctctgaaggtcctctttgggaccccagagtttgtggctcctgaagtgatcaactatgagcccatcggctacgccacagacatgtggagcatcggggtcatctgctatattctggtcagcggactttctcccttcatgggtgacaatgataacgagaccttagccaacgtcacttcagccacctgggacttcgatgacgaggcattcgatgagatctccgatgacgcaaaggatttcatcagtaacttgctgaagaaagatatgaaaaaccgtctggactgcacccagtgccttcagcacccatggctgatgaaagacaccaagaacatggaggccaagaagctgtccaaggaccggatgaagaaatacatggcaagaaggaagtggcagaaaacgggcaatgctgtgagagccatcgggagactgtcctctatggcaatgatctcagggctcagtggcaggaaatcttcaacagggtcaccaaccagcccaatcaatgcggagaaactagagtctgaagacgatgtctcccaagctttcctggaggctgttgctgaggaaaagccccatgtgaaaccttatttctctaagaccatccgtgatctggaagtcgtggagggaagcgctgctagatttgactgcaagattgaaggatacccagaccctgaggtggtctggttcaaggatgaccaatcaatcagggagtcccgccacttccagatagactacgacgaagacggcaactgctcgctcatcatcagcgacgtctgtggggatgatgacgccaagtacacctgcaaggctgtcaacagcctcggagaagccacctgcactgcggagctcatcgtggagaccatggaggaaggggaaggggaggaggggggagaggaggaggaggaggaggaggagtgaagccaagccaaacagaagcagttcctaagtcattttaaaaaggactaattccttaaagctcaaaaaaaaaaaaaaaa

SEQ ID NO: 41 - DNA, 110838 bp, Mus musculus
atgtgggaagctccttatgctgtcggaaagagggggaaaagcttgcttgatgatgagaaaacatttgccaacccttttcaagtcggcgaaccgcttgcaaaagtgcctgaaaagatgactactcaagcaccgatgtttacgcagccgttacaaagcgttgtggtactggagggtagtaccgcaacctttgaggctcacgttagtggttccccagttcctgaggtgagctggtttcgggatggccaggtgatttcaacttccactctgcccggcgtgcagatctcctttagcgatggccgcgctagattgatgatccccgccgtgactaaagccaacagtggacgatactccctgagagccaccaatggatctggacaagcgactagtactgctgagcttcttgtgacagccgagacagcaccacccaacttcagtcagcggctgcagagcatgactgtgagacaaggaagccaagtgagactccaagtgagagtgactggaatccctacacctgtggtgaagttctaccgggatggagccgaaatccagagctcccttgatttccaaatttctcaagaaggagacctctacagcttactgattgccgaagcataccctgaagactccgggacctattctgtaaatgccaccaacagcgttggaagagctacttccactgcagaattggtggttcaaggtgaagaagtagtacctgctaaaaagacaaagacgatcgtgtcgactgctcagatttcagaaacaagacaaacccggattgaaaaaaagattgaagcccactttgatgccagatcaatcgcaacagttgagatggtcatagatggtgccactggacagctgccacataaaacacctcccaggatacctcctaagcccaagtccaggtctccgacaccaccttccattgctgccaaagcacagctggccagacaacagtccccatcaccaataagacactctccctccccagtcagacacgtgcgggcaccaaccccatctccagtcaggtccgtgtctccagcggggaggatctccacttccccgatcagatccgtgaagtcgccactgctcattcgcaagactcagaccaccaccatggccacaggccccgaggtgcctcccccttggaagcaagagggctacgtggcctcctcgactgaggctgagatgagagagacgacaatgacaagctctacccagatcagaagagaagagaggtgggaagggagatacggggtccaggagcaagtgaccatcagtggagccgcggctgctgcggccagtgcgtcggtcagctcgtcattcacggcaggagccatcaccactgggactaaggaggtgaaacaagagacagacaagagtgcagctgttgcgactgtcgttgctgctgttgatatggccagagtgagagaaccagccatcagtgctgtagagcaaactgctcagaggacaaccacgactgctgtgcatatacaacctgctcaagaacaggcgagaaaagaggcggagaagaccgcagtaaccaaggttgtagttgctgccgataaagccaaggaacaggaactaaaatcacgaaccagagaagtgatggtgacaacgcaagagcagactcacatatctcatgagcagataagaaaagaaactgaaaaagcatttgtaccaaaggtagtgatctccgcaaccaaagccaaagagcaagaaactagaatcacgggagaaattactacaaaacaagagcaaaagcgaataactcaagaaacaataagacaggaaactgaggaaattgctgcatccatggtagtggttgccaccgccaagtccacaaaactagaggcagctgtgggagttcaagaagagactgccatacaacaggatcaaatgcacctcactcatgaacagatgatgaaggaaactaggaaaacagtggtacccaaagtcatagttgccacgcccaagattaaagagcaagatttagtatcaagaagtagagaagccatcactaccaaaagagatcaagttcaaataactcaggaaaagaagagaaaggaagtggaaacaactgccttgtctacaatagcagttgctactgctaaagccaaagagcaagaaacagttctgaggtctagagaagccatggccactagacaagaacacatccaagttacccatggacaggtgggcgttgggaagaaggcagaagccgtggcaacagttgtagctgctgtggaccaggcccgagtgagggaacccagagagcctacgcatgtggaggaatcgcattctcagcagactacgttagagtatggctacaaagaacacatttccaccacaaaggtcccagagcagccccggcgcccagcctcagagccccacgttgtccctcaagcagtcaagcctgctgtgattcaggctccttctgagactcatatcaaaactactgaccaaatgggaatgcatatatcgtcacaggtcaagaaaactacagatatctcaacagaaagattagttcatgtggataaacgcccccgcacagcgagccctcactttactgtttcaaaaatttctgtacctaagacagaacatggatatgaggcatcgatagctggtagcgctatcgccacactacaaaaagaattgtcagccacatcttcaactcagaagatcaccaaatccgtgaaggcacccaccgtgaagcctggggagacgagagtaagggcggagcccaccccttccccacagttcccctttgctgacatgccgccgccagacacttacaagagtcaggctggcattgaggtgaagaaggaagtcggggtgagcatcagtggcagcaccgttcgtgaggagcacttcgaagtactgcgcggacgtgaagccaaggtaacagagacagcacgagtgcctgctcctgctgaagtgcctgttactccgcctaccttggtctcgggcttaaaaaacgtgactgtcatagaaggcgaatctgtcaccttggagtgccacatctctggatacccatcccccaaggtgacatggtacagagaagactaccaaatcgaaagttccattgatttccagataaccttccagggtggaattgctcgtctcatgatccgcgaagcctttgcggaagacagcggacggtttacctgcagcgccgtgaatgaggccgggaccgtcagcacttcctgctatcttgctgtgcaagtgtcagaagagtttgacaaggaaacaactctgactgagaaatttgccaccgaagagaaacgcttcgtggagtcaagagatgtagtcatgaccgacaccagcatcacagaggagcaggcagggcctggagagcctgctgcgcctttcttcatttcaaagccggtggtccagaaactggtggagggtgggagtgttgtgtttgaatgccagatcggcggcaacccaaagccccacgtctactggaaaaaatctggcgttcctctcaccactggatacagatacaaagtgagttataacaagcagactggggaatgcagactggtgatttctatgacgttcgctgatgatgctggagaatacactattgtcatccgaaacaagcacggggagacgtctgcatctgcctccttgctggaggaagctgattacgaggcattggtgaagactcagcaagaaatgctttaccagacacaaatgagcacatttattcaagaacccaaagtgggggaaatagcacctggatttgcatattctgaatatgagaaggaatatgaaaaggaacaggccttaattaggaagaaaatggccaaagatactgtgatggtcaggacttttgtagaagaccaagaattccacatctcttcttttgaagagaggctcattaaagagattgaatacagaataataaagactacgctggaagaacttcttgaggaggatggagaagagaagatggcagtcgacatttctgaatctgaagctatcgagtcaggatttgatataaggataaaaaattatagaattcttgaggggatgggtgtcacttttcattgcaagatgtctggatatccgttacccaagattgcgtggtataaggatggcaagcgcatcagacatggggaaagatatcaaatggactttctacaagatggcagagccagcctgcgtatacctgttgtccttccagaggacgagggcatctatactgcatttgccagcaatatcaaaggaaatgcgatttgctctgggaagctgtacgtggagcctgctgcaccatttagcgctccaacttacatgcccacaccagaagcagtgagcagaatcaggtctgtctctccacgttcactgagcaggtcacctatacgtatgtctcctgcgatgtcccctgcacgaatgtcccccgcacggatgtcccctgcacggatgtcccccgcacggatgtctcctggacgcaggctggaggagacagatgaatcacagctggagagactgtataagccagtctttgtattaaaacctgcttctttcaaatgtttagaaggacagactgccagatttgacttgaaggttgtgggcagacccatgccagagacattctggtttcacaatggacagcaaattgtcaatgattatacgcacaaagtcgtcattaaagaagatggaactcagtcactgatcattgtccctgcgtcacccagcgattcaggagaatggacagtggtggcccaaaacagagcaggaaaatccacaatatctgtgactttaactgtagaagctgtggaacaccagatcaagccagcatttgtggaaaaactgaaaaatgtcaacataaaggaaggttccaggctcgaaatgaaagtcagagctacaggcaaccccaaccctgacattgtgtggctgaaaaacagtgacatcattgttcctcataaatacccaaggatcaggattgaaggaaccagaggagaagccgcccttaagattgattccattatcagccaagattcagcctggtatacagccacggctattaacaaggcaggccgagacaccacaaggtgcaaagtcaatgttgaggttgagtttgcagaacctgaaccggaaagaaagctgattattccacgaggaacgtacagagcaaaggagattgctgccccagaactggagcctctccatttgagatacggtcaagaacagtgggaggagggtgacctctatgacaaggagaaacaacagaaaccgtttttcaagaaaaaactcacttccctcagactgaagcgctttggacctgcccactttgagtgcagactcacaccaattggtgacccaaccatggtggtggagtggcttcacgatgggaagcccctggaggcggccaacaggcttcggatgattaatgaattcggctactgcagccttgattatggagcagcgtattccagagacagtggtgtcatcacctgcagagctactaacaaatatgggacagatcacacctctgctactcttattgtcaaagatgagaaaagcctagtggaagaatctcaactgcctgatgggaaaaaaggcttacagaggatagaagaactagagagaatggctcacgaaggtgcgctgacaggtgtgacaacagatcaaaaagaaaaacaaaagccagacattgtcttgttcccagagccagtgagagtgctggaaggggagacagccagattccgctgccgagtgacaggctaccctcagcccaaggtcaactggtacctcaatggacagctcatccggaaaagcaaaaggttcagagttcgctatgatggcattcactatctggatattgtggactgcaaatcctatgacacaggtgaagtcaaggtcactgcggaaaatcctgaaggtgtgacggaacacaaagtaaaacttgaaatccaacagagggaggatttcagatctgtccttaggcgtgctcccgagccaaagcccgagtttcatgtacacgaaccggggaaacttcagttcgaagtgcagaaggtagacagacccgtggacaccagcgaaaccaaagaagtggtgaagctgaaaagggctgaaaggattacccatgagaaggtgtccgaggagtctgaagaactgcgcagtaaatttaagcgccggacggaagagggatactatgaagccatcacagccgtggagctgaagtctcgcaagaaggatgagtcttacgaagagctcctcaagaaaactaaagatgagcttctgcactggaccaaagagttaactgaagaggagaagaaagccttggctgaagaaggcaaaatcacgattccaacctttaaacctgagcgaatcgaacttagccctagtatggaggcacccaaaatctttgaacgaatccagagccagaccgttggccaaggatctgatgctcactttagagtcagggttgtgggaaaaccagaccctgagtgtgaatggtataaaaatggtgtaaaaattgagcgatctgaccgaatctactggtactggccagaagacaatgtttgtgaactggtcataagagatgtaactgcagaggactctgccagcatcatggtaaaggccatcaacatagctggggaaacctcaagccacgcattcctgctcgtccaagccaagcaactgatcacttttacacaagaattgcaagatgttgttgctaaggaaaaggacaccatggcaacatttgaatgtgaaacttcagaaccatttatcaaagtaaaatggtataaagatggtatcgaagttcatgcaggggataagtataggatgcactctgaccgaaaagttcacttcctgtctgtgctgaccatcgacacatctgatgctgaagactacagctgtgtacttgtggaagatgaaaatatcaagacgacagcgaaacttattgtggaaggtgcagtagttgaatttgtgaaagaacttcaggacatagaagtcccagagtcatactcaggagagttagagtgcatcatatctccagaaaacatagaaggcaaatggtatcacaatgatgtggagttgaagtccaatggcaaatactcaattacatcccgccgtgggcgccagaacctcacagtcaaggatgtaaccaaagaggaccagggagagtacagctttgttgttgatgggaaaaagacaacctgtaaactgaagatgaaaccccgacctattgctattctccaaggacttagcgatcaaaaggtctgcgagggtgacattgttcaacttgaagtcaaagtctccttagaaaatgtagaaggtgtctggatgaaagatggtcaagaagtacaacacagtgacagagttcacattgtaatagacaagcagtcccacatgctacttattgaagacatgaccaaagaagatgctgggaattactccttcactattcctgcccttggactctccaccagtgggaatgtctctgtctatagtgttgatgtgataacacctctcaaagatgtcaatgtgattgaaggtaccaaggctgtacttgaatgcaaggtctcagttcccgatgtaacttctgttaaatggtacctaaatgatgaacaaatcaagcctgatgatcgtgtgcaatccattgtcaaaggcaccaaacagcgacttgtgattaaccgaacccatgcttctgatgaaggaccttacaagctgatggttggcagggtggaaaccagctgtaacctgtctgtagagaaaattaaaattatcagaggtctccgtgaccttacctgcacagaaacacaaaatgtggtctttgaggttgagctatcccactcaggaattgatgttgtatggaattttaagggcaaggaaattaagcccagttctaaatataaaattgaagctcatgggaaaatatacaaactgacagtcctcaatatgatgaaagatgatgaaggggagtatgcattctatgcaggagaaaatacaacatctggaaagctaactgtggcaggaggagccatctccacaccactcacagaccagactgtggctgaatcccaggaggctgtgtttgaatgtgaagttgccaaccctgagtctgagggggaatggctgaaggatggaaagcacttggctctgagtaacaacttcagaggtgaatccgatggccacaaaaggaggcttgtcatcgctgccgccaagttagatgacgctggagaatatacctacaaggtggctacctccaaaacatctgccaagctgaaagttgaagctgtcaaaattaagaagaccctgaggaacctcactgtgacagagacacaggatgcagtcttctctgttgaactcacacacccagatgtcaaaggggtccagtggatcaaaaacggagttgtcttagattccaacgacaagtatgagatctcagtcaaagggacactttattcactgaagattaaaaactgtgccatggcagatgaatctgtctacggcttcaaactggggaggctaggagctagcgcccggctgcacgttgagactgtcaagattattaagaaaccaaaggacgtgaccgccttggaaaacgccactgttaccttcgaagtcagtgtttcccatgacacggtgccagtaaaatggttccataagaacgtggagattaagccaagtgacaagcacagactggtctcagagagaaaagtccacaaactcatgcttcagagcatctccccctcggatgccggcgagtacacagccatggtgggccagctggagtgcaaagccaagctgtttgtggagacactccatatcacaaagactatgaaaagtatcgaggttcctgaaaccaaagctgcctctttcgagtgtgaggtgtcccacttcaatgtcccctccatgtggctaaagaacggagtggaaattgagatgagtgaaaaattcaagatcgtcgtgcaggggaaactgcaccagctgatcatcatgaacacgagcacggaggactcagcggaatacacatttgtttgtggcaatgaccaagtcagtgctaccctgacagtgaccccaatcatgattacatccatgctgaaagacatcaatgctgaagaaaaagataccataacttttgaggtgacagtaaactatgaaggcatctcttacaaatggttaaagaacggtgtggagatcaagtcgactgacaggtgccagatgagaaccaagaagctcacgcactcgctgaacatcaggaatgttcactttggagatgctgctgattatacttttgtggctggaaaagccacatcgacggccaccctttatgtggaagctcgtcatatagaatttaggaaacacattaaggatattaaggttctggagaagaaacgagccatgtttgaatgtgaagtttctgagcccgacataactgttcagtggatgaaagatggccaagagcttcagatagcagacaggataaagatccagaaggagaaatatgtccaccgccttctgatcccatccacacgcatgtctgatgccgggaaatatacagtggtggcaggaggcaacatgtcaactgctaacctctttgtcgaaggcagggatgtccgcatccggagcattaagaaggaggtccaggtcattgagaagcagcgtgctgtcgtggagttcgaagtcaatgaggatgacgtagacgcccactggtataaagatggcattgaaatcaacttccaagttcaagagcgacaccagtatgtggtggagagaagaattcaccggatgtttatatcagaaacaagacacagtgacgcaggcgaatacacctttgtggcaggcagaaacaggagttctgtgactctttatgtcaatgctccagaaccaccccaagtcctgcaggaactccagcctgtcactgtacagtccggcaagccggctcgcttctgcgccgtgatatcaggcagaccgcagcccaaaatttcctggtacaaggaggagcagctgctttccactggcttcaagtgcaaatttctgcacgacgggcaggagtacacacttctgctcattgaggctttcccagaggatgcggcagtctacacctgtgaagccaagaatgactacggagtagccacaacgtcggcttctctgtccgtggaagttccagaagttgtatctccggatcaggaaatgccagtctacccgcctgccatagtcactccacttcaggacacagttacttctgaggggcgcccagcgcgtttccagtgccaagtttcagggacagatttgaaggtgtcttggtactgcaaagacaagaaaatcaaaccatctcggttcttcaggatgacccagtttgaagacacctaccagctggagatcgctgaagcctaccccgaggacgagggaacgtatgcctttgttgctaataatgctgtgggccaagtgtccagcactgccaccctgaggctggaaggatttagcaaatctgaagaagttacatcaaaatcccaatggcatacctcaccatcagtctcacttaagaaggaggcccttggccaaaagcccatcttcatccagcctctgtcaagcctcagggtgcacagcggggagacagtcagatttcacgcgagggtttctggtgttcccaagccagcaatccagtggtttcataaccaccagccaattctaccatcaaaagatgtagttttccattttgaggaatccacaggcatggctttaatgcttatagttgatgcttacccagagcatgctgggaaatactcttgcagagcagccaatagtgctggggaagccacttgtgcagctacgctcacagtgactgcaaaagcccccgagtcgattctgcatgagaggatcggccagcaaatcgaaatggagatgaaagaagaactctttgagggggaagctgatggctcaggagatgcaagaggagccttctctgactcggaagacatagaccaccactccctgatggccaggagatatgcaaatagaacgtcatctacaagctcctggcctgaatatttcaagccgacttttactcaaaaactcacatttcaatatgctttagagggtgaacctattgtgtttacatgcagcctggttgcctacccaactccagaaatgacttggtttcataataacaggccgatcccaacaggtctccgtcgggtcgtaagaaccgagactgacttacaccaacactcttccagcttagaggtgaaaagggtccaaggccgagattcgggcagttacaggttcttggcggttaatagtgaggggtctgccgagtccagtgcatcactgcatgttatccagaaagggcaagatgagagatacttagaatttctgaaaagggcagagcagacatgggaaaacacgcggggtctaggtgaaaggagagaagagaggataaaggttggcctgaggtttactggctccccctttaacaaaaagcaagatgtggaagagaagggaatggtgagaaccatacactttaggtcagcgagccctgtcaggagggcagactatgtgtacaatgacgagtggtcagaaagcaaatttgatatcagaggatgcctgagcgtaggtgagagtttcctagatgaggaaaccaaaatgaaattgcagcggttacgggaggcaagaaaaatcttcttagagaaaaagaaattatcgcttttagaagcgtcgtctgaagtaaactcggtgactgtgagaagtgaggatattgttggagatgctccactctctagagaggaagggaagcgtgggtttggacgcgagtttgctgaagacagacatagggtcgataactcagcagaaggagtcatcgagaatccgtattccgttccaaatcaaatacatcaaaacagagaacctccttcaagtgtccgagccactggtgatgaagatctccagacggaaaatagcccggaccaagagacctttctagaagaaagcctccagaaaggctatttgtgtgagcatgtcctagtaggtgaaaacctgcaagccgtggagtggtttgaagagtctgtgaccagcactgtgatcagagaaccattgccattcacctctaatgaggaagtgcatggatataagagtagaggaatatgtgaatctcctgataaggtgtctcaggttcttacaccatatcctagtgagtccttggatacatttgttgatgctaaagagaccgaagatgtagatagtggaggaggaacacagaggggttggcaagaggggcagtgccacgcttccaccaaagtggaagaattcaaagtggagcatgaggagaaaacacggtctttcgaaaattacttccaaaaacatccacaacgttgcccaccttcatttctccaggatattgaatcacaagaagtttatgaaggtgacagctgtaaatttgtgtgtcactttcaaggataccctcagcccattgtgacctggtataacaatgagatgcccgtaccgcgtagtcaaggttttaccactcatacattcgagaactactcaacgttaacctttccttctgttcagccccagcatggaggctctgttacctgtgtgctgtttaaccagtatggaacagttaaagcaaccagtatgcttagagtgaaggcaaaaccaaggtatgagtcccagcctcataaggtcccagtgtggcctgactacgcagatgaagaagaggagctggccttggtgtttgaccaggcaagaaggattcacccatcttttagtcaagagaggcaagaacatctccatatgttaaaagctcacctcccagaactcccctctgcagacagagagctgctctccttccctgtagaaattcagataactgcagccactccaaccccagagcagaacaaagaatgcagggaactgtttgagttggagcctgaagtaacacctcgagatcaagccatccagtcaccaaaacacaaatttatcttctcctctgatattaccaatgagccgccaaagatgctacaggaaatgccaaggagtgccagttgtagggaagggaattctgtaatgcttgaatgtttaatatcaggggagcctcagccagtggtcatgtggtttcataatggagttctcgtaaagccgaaccaaaggtttgagatggaagaagttaattgtagctacagattatatatcaatgatgccagttcacaagactctggaaggtatcagtgtgtggctcaaaatgactcaggcatagctgagagtattttagatttaactgtagaacccatcacttatagggaatatagtcagttggaaaatgaaagcagaatttatgcacagtattccaaaaatcaacaaacacaagttcagggggaacctgtaaggacacatttttatgatcatacagttagtccttttgctgcccaatcaaatataaaagaatatactataagggagtattttcaaagccttgagacagttggggagttggaaaagaaaaatgaggtatactgtccaactactgttgaaaaactatccaagtctatgcagcatgcttctagacccacagacatcgagaagcctcacagaatggagtttctacaatgccaagatgaggaacatataggtgagaggtctcagtcactccaagcaggggctaccatttgtccatttgttgatgacttcagcaaagctaacattagaaacaaagtcagcgatgatgttggatatcatggaccggactggggaaatatgaaaggacattctcaaagtgattatgtgctaaatatccactccaagagaacctctaacacagttcaggacgtggaagactcacctgtccctacctatgaagaagcccttgaagaagaaaggtactaccccgggaaaaaggtgaggcataaggtcattgcgttcgaaaagctgcagcgtgcagaaaggggagttgtagaaaagagacggaccaagaaatcctttgttacagcaccacaaaagaaatgggataatcgagagttttcattaacacaaaatgaaccaggctcgagcaatatgtatcgggcagaggaagtggcttcacacacagaagcagattcctctaacatcataatggatttgaagcagctttcctctcaagctcacgaggagtttgaaatagaagagaggggacgacaggaagaaatacttcccctagaccaagaaaagtttgagctcgaagcacctgttacatttgacctaaagcagtttcactcacagattgaaagtacaggcatgaatttccaaggtttggccaatggccaacaagataaaagctctttaaaaactcaacaacctgcttcagaaatggctaatcctgaagatgttgtctttgatctaaagcaaatgtattctcacatagaagatccaggcgaggtgttccagggccaagaaactgaaagcaagcaggaaacatgccacaaagaagagatttctatctaccaaagctttcaatatgcccaggaagaaaacacagcaattttaaaacctgatcatgtgcctgagtcgttttctgaagtgatccatggtgaagcacgggctttgtttcagactccatctgctgatgtggaagaagctaacgtttctgagacaggtgcttctgtagaaaatggagataagactttcatttcacagttgaaaagggcagccagtgaagaagagtgtttggaggatcatgaaatggaggacggacccaccttgaaaccagcatttggtatgactcaggggtatgaaggaactctagaaaaccccagaggtgctgttcatggagcagaagtgcctcacagacggctgtctctgagtcaggacttgccattcttgatgactggagagcagcaggacctaaaggaacagttgagtgaatcaattgaggcctcaggagaggaaacctatcatgaagttcacgtaccaagtgaaagctctttctccaccatggaaggagaaaagatagaaaagagtttgcttgaaaatctccctcgattggaggaggcccaaaccactaaagagggagaatatgagacctctctaacacagtacttacttgctgagggaaggtatgaggtgcctgaagttagagacaccaaacacaaggcacaacttgttcagagcgactcaaccacttcaatggaggttgaagaagtaactttcaacaccgtgtatgaatattacaaccagaaacaggaatccgtagggcgaccctattctcctgagtctgatatttccattgatgtgggaagtacaagcagcgaagatctgtctgagttggatcagttctatagcccaccatcatctgtagaaaatttagaatctccaaagtctcctgatttatattttaagccttcagatagaattgagcaacctgtagcaaattcaagagctgaggaaaatggggaaagatactcaacaccttctgaaggtgaaataccagaaagatactccacaccctcaggggaggctctggagagatactccactcctccaggggaggctctggagagatactccactcctccaggggaggctctggagagatattccactcctccaggggaggctctggagagattttctacacccccaggggaggctctggagagattttccactcccccaggggaggctctggagagatattccactcccccaggggaggctctggagagattttccactcccccaggtgagaaactagagagaggttttattcccactagaggaccaaaccatgctagaaatgtaagcaggaacctgtcagagctagagagggaagacagcactgcgaatgagcatttccatacacctacggacgagaggagctcaccttatgaaacatggcgttcagactcattcggcacacccaatgaagccatcgaacccaaagacaatgaaatgcctccatctttcatcgagcctctaagtagaaggaagatatacgaaaatacaacattaggcttcatcattgaagttgagggtcttccggttcccggtgtgaaatggtatcgaaataaatctttgctggagccagatgacaggatcaaaatggaaagggtgggcaatgtgtgttctctggaaattgccaacattcaaaaaggagacggaggagagtacctgtgccatgcggtaaacatcataggggaggcaaagagctttgcaattgtagacgtcatcccccaagaggaaagagctgtggccctgccgccaccagtaacccaccaacacatcatggagtttgacgtggcaaacagcaactcgtcgagaacaccttcgcctcaagagattgtcctggaagtggaactaagtgaaaaggatgtgaaggaatttgaaaagcaggtgaaaatagtcacagttcctgaattcactcctgatcataaaagcatgattgtgagcttagatattctcccgctgagtttagtcgatcccagtgcggagtcccaagggcaagaaggcagagagtttaagatcgatttggaagccttcgaaatgcctcctcgcttcataacacccatctgcgactttagaattccagaaaattccagcgctgtgttcaaatgttcagttataggcattcctcccccagaagtcagatggtataaggagtacatgtgcattgagccagacgacacaaagtatgtgattagcgaggagaaaggaagtcacagccttagaatccaagatgttggcccttccgactgtgcgacatacagatgcagagctctgaatagcgcaggagaggccatctgccgaggcttcctcaccatgggagactcccaagtctctgctgtggccaccaggacaagcaaagtgactttaagcagtcagaaggaggagctagtcttaaggagcagatacgcagacagcttttttgaattccaggtggtggatggccctcccaggttcatcaaaggcatttcagattgccacgcacccttagggacagcggcatatttccagtgtttagtccgtggttcaccgagacccaccgtttcttggtacaaagatgggaaactggtccaaggatcacggttcagtgctgaggaaagtggcatagggttccacaatttgttcataacaggcttagttaaagaaattgctagccttctgtccgccgaggaagattttcaaacctatagttctgatctacgtttacctaatgcgaatgaaacacttgaacttctgtctgagcctccagctcgttccacccagtttgattccagacaggaaggcgctgccccagttttcatcagagaaatatcagacgttgaaataagcgtcgaagatgtagctaaattgtctgttactgtcactggctgccccaagcctaaaattcaatggttctttaatgggatgctgttaaccccttctgctgactacaaatttgtctttgatggggatacccacagcctaatcattctgttcaccagatttcaggatgagggggagtacacgtgcctggccagtaatgaatatggaaaggcagtgtgtagcgctcacctaagaataagtcccagaggagagaggagcacggagatggagtcaggagagaaaaaggctctggaaaagcccaaagggccttgtcctccttattttttcaaggaattaaaaccagtgcactgtggcccaggaatccctgctgtctttgagtactcggtgcacggagagcctgcccccactgtcttgtggttcaaagaagacatgccactttataccagtgtttgctacaccatcattcacagtcctgacggatccgggaccttcatcgttaatgacccacagaggggagatagtggcctgtacctctgtaaagcccagaacctctggggggagtccacctgtgccgcagagcttcttgtgcttccagaagacacagatgtgcccgatgcctcctgcaaggaagagtccaccttaggagttcctggtgattttctggaaacatctgccaggggccctttagttcagggagttgactcacggcaggaaattacagcttttgccgagggtaccatttcgaaagctgctttaattgcagaggaaacgctgcagctttcttacgagcgtagtgttgatgacagtgaagtgggtactggggtgaccataggggcccagaagctgccgcctgttgtattgtccactccccagggcactggggagctgccttccattgatggtgcagttcacacacagccaggcagaggaccaccccccactttaaacctgcaggcagtccaggctcagacaaccctccccaaggaagctactctacagtttgaagagcctgagggagtcttcccaggtgcctcatctgcagcacaagtgagtccggtcaccatcaaacctctgataaccttaacagctgaacccaaagggaattatccacagtcttccacagcagctcctgatcatgcacttctgtcctctgtggctgcagaaacacttcagctaggagaaaagaaaatcccagaagtggacaaagcacaaagagctctcctcctgagtcagagcttagctgagggatgtgtagaaagtttagaggttcctgatgttgcagtctctaacatgcgctctgagccccaagtccctttccaacatacatgcacagaaggcaagatcctgatggctagtgcagacactctaaaaagcacagggcaagatgttgcactgaggaccgaggaaggcaagtccctaagcttcccactagcacttgaggaaaagcaggtcctacttaaggaagagcaatcagaggtcgtggcagtgcccactagccaaacctctaagtctgagaaagagccagaggccataaagggagtgaaggaggtacgagaacaggagctgctttctaaggaaacattgtttcctagtatgcctgaagagcagcgattacatctgaaaactcaggtccgcagggctttgcaagctgccgtggccagggaacaagcaaatcttttctctgagtggctaagaaacattgacaaggtggaggtcacagccgtaaacttcactcaagagcccaagcgtatcctgtgcacctaccttattacctcagtgagctcactaaccgaagagttaaccgtcactattgaagacatagatcctcaaatggctaacctggaaactggactgaaggatgccttgtgctccattgtctgtgaagaaagaaacatcttaatggctgaggatccgaggattcacgaagaagacaaaatagacgtgcaaggcggaagagatcacctttcagatgcacagaaagttgaaaccgtcatagaggcagaagctgactctaagtaccttgtctccaaagaagaggtcagttggtcgaaagtggaaagtcaactcaaagatggagataccaatgaggttccgcaggctgagactctgaaattagcagaagagagtggtacccagaagaccagtacagagatgtcacaagaagaagctgagggtaccttagctgacctttgccctgctgtccttaaacacttagtggataccatttctgaggaaggagatactgtccaccttacatcatccatatcaaatgctaaggaggtgcactggtatttcaagggtaacctggtgccctcagacggaaagttcaagtgtttaaaggagcagaatgcctacactctggtaattgaggcagtaaagacggaggatgaaggggagtatgtctgcgaagcctcaaatgacagtgggaaagcaaagacatcagcaaagctcactgtgggagaaagagctgcccctgtgatcaaaaggagaattgagcccctggaagtagctctgggccacctggccaaattcacctgtgagatccaaggagcccccaacgtccggttccagtggttcaaagctggcagagagatctatgagagcgacaagtgttccattcgatcttcgaactatgtctccagcctggagatcctgagaacccaggtcgttgactgcggggagtacacctgcaaagcctccaatgagtatggcagtgtcagctgcacagccacactaactgtgacagaggcgtatccaccaacctttctctccaggcccaaggcccttacgactttcgtgggtaaggcagccaagtttctctgcacagtgtcagggactccggtgattgagatcatctggcagaaagatggcgctgccctgtcaccgtcacctgactgcagggtcacagacgcagacaacaaacacagtttagaactctcaaatcttactgttcaggacaggggtatttactcttgtaaggcttccaacaaatttggagcagatatctgccaggccgagttgaccatcattgacaaaccccacttcattaaagagttagaggctgtacagtcagccatcaataagaagatccaccttgaatgccaagtcgatgaggataggaaagtcacaatcacatggagcaaagatgggcagaaacttcctgctgggaaagattacaagatctattttgaagataaaatagcatcgcttgagattcccctggccaaactaaaagattctggaacctatacatgtacagcgtccaacgaggctgggagcagttcttcgtctgctgcggtcgctgtcagagaaccgccgtcctttgtgaagaaggtggatccctcttatttaatgctcccgggtgaatcagcacgcctccattgcaagctgaaaggctcacctgtgatccaggtcacttggttcaaaaataacaaagaactcagtgagagtaacacagtccgcatgtcttttgtcaattctgaggctatcctcgacatcactgatgtaaaggtcgatgacagtggtacttactcctgtgaagccaccaatgacgtgggcagcgacagctgcagcactgaagtggtgatcaaagagccgccttccttcatcaaaactcttgagcccgcagacatagtgcgaggggccaatgcactgctccagtgtgagatcgcaggcacgggaccctttgaagttaactggtttaaagacaagaagcagatccgaagtagcaaaaagtacaggttgtttactcagaagacttttgtgtacctggaaatctcatctttcaatagtgccgacgttggcgattacgaatgtgtagttgctaacgaagtcggaaagtgtggctgtgtcgcgacacacttattaaaagaaccaccaacctttgtcaagaaagtagatgattttacagccctagcaggacagaccgttaccttacaagctgccgtgagagggtcagaacccatttctgtcatgtggatgaaaggccaagaagtcattaaagaagatggaaaaatcaaaatgagcttttccaatggagttgccgtcttgaccatccctgatgttcagattagtttgggtggcaaatatacatgcctggctgaaaacgaagctgggagccaaacatctgtcggggaattgatagttaaagaacctgccaaaatcattgagcgagcagaactaatccaggtgaccgcaggagacccagccactctggagtacacagtctcaggcaccccagaactcaagcccaagtggtacaaagatgggagacccttggttgctagtaaaaagtaccgaatcagttttaaaaacaacattgcccaactgaaattttattctgctgaactgcacgacagtggccagtacacgtttgagatttccaacgaagtgggcagcagctcctgtgagaccacatttaccgtgttagatcgagacattgctccgcttttcaccaaacccttacgtaacgtggacagtgtcgttggcggtgcctgcaggttagactgcaaaattgctggctccctccccatgagggtttcctggtttaaggatggcaaagagctcactgcttccgacagataccagatagcatttgtggaaggcacagcctctttggagatcagcagagtagacatgaatgatgcagggaatttcacctgccgggccaccaattccgtgggaagcaaagacagcagcggagccctgattgtgcaagaaccacccagttttgtaactaagccagggtccagggatgtcctgcccggctcggcagtctgtctgaagagtgctttccagggctccgcccctctcaccatcaagtggtttaagggcgacaaagagttggtttccggtggaagctgctatattaccaaagaaacttcagagagttccctggagctctacgcagtgaaaacctcggattcgggcacttacacgtgcaaagtcagcaacgtagccgggagtgtggaatgcagtgcagacttgtttgtgaaagagcctgctacctttattgaaaagttagagccatcccaactgttaaagaaaggagatggcactcagctagcctgcaaggtcacgggtacccctccaattaagataacatggtttgcaaatgaccgagaactgagagagagcagcaaacacaaaatgtcttttgcggagtccaccgcagttttaaggcttacggatgtggccattgaagacagtggagaatatatgtgcgaggcacaaaacgaggccggcagtgaccactgtactggcattgtcatagtcaaagagtcaccttactttaccaaggaatttaagtccattgaagtattaaaggagtatgacgtcatgctgctggctgaggtggcaggcacccctccctttgagatcacttggttcaaggacaacacaaccctgagaagtggtagaaagtataaaaccttccttcaggatcagctggtcagcctgcaggtcctcaagtttgtagctgcagatgcaggtgaataccaatgccgggtgaccaacgaggtcggcagcagcacctgcagtgccagggtgacattaagagaacccccgtccttcattaagaagattgaagccaccagctccctccgtgggggcacagccgccttccaggccactctgaaaggctccttgccaatcactgtgacctggttgaaagacaatgatgagatcactgaagatgacaatataagaatgacttttgagaacaacgtggctagtctatacctcagtggtattgaagtcaagcatgatgggaaatatgtctgtcaagccaaaaatgatgcaggcatacaaaggtgttctgcattactctcagtcaaagaacctgcaacaataatggaggaggctgtgtccatagatgtcactcaaggagacccagccactttgcaagttaaattttcagggactaaggagatttcagctaaatggtttaaagatggccaagaacttaccctgggtccaaaatacaaaatcagtgtcactgacacagtctcaatactaaagattatttccacagagaagaaggatagtggagaatatacttttgaggtccaaaacgatgttgggagaagcagctgcaaggctagcattaatgttttagatcttattatacctccttcattcaccaaaaaattgagaaaaatggacagcattaaaggatcttttattgacttagagtgtatagtggctggatcccatccaataagcatccaatggttcaaagacgaccaagaaatctcagctagtgacaagcacaaattctcttttcatgacaataccgccttcttagagatcagtcagctggaaggcacagacagtggtacatatacctgttctgccaccaacaaggcaggccacagccagtgcagtggtcacctgacagtcaaagaacccccttacttcgtggaaaagccacagtcacaagatgtgaatcccggtacgagggttcaattgaaggctcttgtgggtggcactgcacccatgacaataaagtggtttaaagataacaaggagctgcaccctggggcagctcgctcggtttggaaggatgacacctccaccattcttgaactcttctcagccaaggctgccgactccgggacctacatttgccagctaagcaatgatgttggcacaacaagcagcaaggccaccatctttgtgaaagaacctcctcaatttattaagaagcccagtccagtgttagtgctgaggaatggacagtcaacaacatttgaatgccaagtcacaggcacccctgaaatcagagtttcttggtatctggatgggaatgaaataacagatcttaggaaatatggcatttcttttgtggatggtttagccactttccagatttctaatgccagggttgaaaacagtggaacttacgtctgtgaagctcgaaatgatgcaggcaccgcgagctgcagcattgaactaaaagtaaaagagcctcccatctttatccgggagctggagcctgtggaagtggtaaaagacagtgatgtggaactggagtgtgaagtcatggggacaactccatttgaagtcacttggctgaagaataacaaggaaatcagaagtggcaaaaaatacacaatgtctgagaaaatgtcagtgttttacctgcatataaccaagtgtgacccttcagacgttggtgaatatcagtgcatcatagccaacgaaggaggcagctgtgcttgtagtgctcgggttgccttgaaagaaccaccatcgtttatcaagaagatagaaaatgtcaccactgtcttgaagagttccgccacctttcagagcaccgtggcaggctcaccgcccatttctataacctggctaaaagatgaccagattcttgaggaaaatgacaatgtccatatttcttttgaggacagtgtggccacacttcaagtccggagtgtggacaatgggcacagtgggcgatacacatgtcaagccaagaatgagtcaggaattgagaggtgttatgctttcctcttagtacaagaacctgctcaaatcatagagaaagctaagtcggttgatgttactgagaaagacccagtcaccctggagtgcgtagtggctggaacaccagaactcaaagtcaaatggcttaaagatgggaaacaaattgtacccagtagatatttttcaatgagttttgaaaataacgtggccagttttaggattcagtcagtcatgaagcaagacagtggacagtacacgttcaaggtggaaaatgactttggaagcagtagctgtgatgcctacctgagagtgctagaccaagatattcccccatcgttcaccaaaaagttaaccaaaatggataaagttctgggttcttctatccacatggagtgcaaggtttctgggtcacttcctatcagtgctcagtggtttaaagatggaaaagagatatctacaagtgcaaaatacagactggtgtgtcacgaaaacaccgtgtcactggaagttagtaatctggaattagaagacactgcaaattacacctgcaaggtgtccaatgtagcaggggacaacgcctgtagtggcatcttaactgtgaaagaaccaccaagcttcctagtgaaacccgagaggcagcaagctataccggattctaccgtggaatttaaggctgtgctgaaaggaacaccaccgttcaaaattaaatggcttaaagatgatgtggaacttgtctcaggacctaagtgtttcattggcttggaagggtcaaccagcttcttaaacctctactcagtggattcttccaagactggacagtatacttgccaagttaccaatgacgttggtagcgactcttgcactacaatgttgcttgtgacagaaccaccgaaatttgtaaagaaattagaagcttccaaaattataaaagcaggtgactctgcacgattggaatgcaagattactggatctccagaaatacaagttgtgtggtatagaaacgaacacgagctcacagccagcgataaataccagatgactttcattgactcggtggcggtcatacagatgaacagccttgggacagaagacagtggagattttatctgtgaggctcagaatcctgccggcagcaccagctgcagtaccaaggttatagtaaaagaaccacctgtttttagcagctttccgcctatagtagaaacccttaagaacactgaagttagccttgaatgtgagctttcaggaacaccgccatttgaggtggtgtggtacaaagacaagcgccagctccgaagcagcaagaagtacaaggtcgcatctaagaatttccatgcgagcattcacatcctcaacgtggaatctacagacattggcgaataccactgcaaagcacagaatgaagtgggcagtgacgcttgcgtttgcgctgtaaagttaaaagaaccaccaaaattcatttccaagctgaacagccttacggtggtagctggcgagcctgctgagctgcaagcatccatagaaggtgcccagcccatttctgtccagtggcttaaagagaaagaagaagtgatcagagagagcgagaacattagaatttctttcgtcaacaacgttgcaactctgcagtttgctaaagtggagccagctaatgctgggaagtacatttgccaagtcaagaatgatggcggagtgagggaaaacatggccacgttgaccgtcttagagcctgcggtcattatagagaaggcagggtccatgacggtgactgtgggagaaacgtgtgccctggagtgtaaggtggctggcactccggagctctctgttgaatggtataaggacggaaagctcttgaccagcagccaaaaacacaaatttagcttctacaacaaaatctcttccttaaaaatcctctcagttgaaaaggaagatgcaggcacctacacattccaggttcagaacaacgttggaaaaagcagttgcacagctgtggtcgatgtgtcagaccgaatggtccctccctctttcacacgaagactgaaggatactggtggtgtcctgggcacctcttgcatcttagaatgtaaagtagctggatcgtctcccatctctattgcctggtttcatgagaaaactaagattgtcagtggagcaaagtaccaaacaacattttcagataatgtctgcacattgcagttgaattctctggactcatcagatatgggcagttacacatgtgtggctgctaacgtggctgggtcggatgaatgtcgcgcactgttgactgtacaagagccaccctcttttgtgaaagaacctgaacccctggaagtccttccgggcaaaaacataaccttcacaagtgttatcagaggaacccctccattcaaggttggctggtttaggggagccagagaactggtgaaaggtaacagatgcaatatctattttgaagacactgtggcagaactggaattatttaatatcgacatatcccagagtggggaatacacctgcgtggtttctaacaatgccggccaagcatcctgcactacacgtctctttgtgaaagaaccagccacgtttgtaaagaagttaagtgatcactctgtagaaccagggaagtctataattctagagggcacctatactggaacacttccaatttcggtcacctggaaaaaagacggtgttagcataactccatctgaaagatgtaacattgtcaccacggagaaaacgtgcatcctggagattctgagcagcaccaagggagatgcagggcattactcctgtgagattgaaaacgaggcaggaagagatgcttgcgacgctcttgtatctacattagaaccaccttattttgttacggagttagaacctctggaggcatctgttggagattcagtttccttgcaatgccaagttgctgggacaccagaaattacagtgtcttggttcaaaggagacaccaaattaaggtcaactccggaatacaggacctactttacaaacaacgtggccacacttgtgtttaataaagtgagcatcaatgacagcggggagtacacgtgcatggcggagaatagcataggaacagcagcctctaagaccatcttcagaatccaagagcgccagctcccgccttcctttgcaagacagttaaaggacattgagcaaactgttggattaccagttaccctcacttgtcgactaaatggctctgcacccatccaagtgtgctggtatagagatggggtgcttttaagagatgatgaaaatctacagatgtcatttgtggataatgtggcaacattaaaaattttgcaaactgacctgagtcactctggccagtattcttgctcagcttccaatccacttggcacagcatcttctactgctagactaacagcaagagaacctaagaaatcacccttctttgatatcaagccagtatcaatagatgttatcgctggagaaagtgcagattttgagtgtcatgtgactggtgctcagccaatgagagtcacttggtcaaaagataacaaggaaatccgacctggaggaaactatactatcacgtgtgtgggtaacactccccatctgaggattcttaaagtgggcaaaggagactctggccaatacacgtgtcaagccaccaatgacgttggcaaggacatgtgctctgctcagctcagtgtgaaagaacctcctaagtttattaagaaattagatgcttcaaaagttgcgaagcagggagaatccatccaactggaatgtaagataagtggctccccagagatcaaagttgtgtggttccggaatgacagcgaacttcacgaaagctggaaatacaacatgtccttcgtgaattctgtggccctgctaaccatcaatgaagccagtgctgaggacactggggactacatctgtgaagcccacaatggcgttggtgatgccagctgcagcacagccctgaaagttaaagcacctcctgtctttacccagaagcctcctccagttggagccctgaaaggttctgatgtgatcctgcagtgtgaaatttcaggaacacccccctttgaggtggtgtgggttaaagatcggaagcaagtgcgaagcagcaagaaatttaaaatcacctccaaaaattttgacacgagtcttcatatctttaatctggaagcccctgacataggggaatatcactgcaaagccacgaatgaggtgggaagtgacacgtgcgcttgcacggtcaagttcaaagaaccaccacgatttgtgaaaaaactcagtgatgcgtccacccttattggggatcccgtggagttacaagccgtggtagaaggtttccagccgatttccgttgtctggctgaaagataaaggtgaagtcatcagagagagcgaaaacgttaggatttcctttgttgataacatcgcaactctccaactgggaagtccagaagcatcacagtctggaaaatatgtgtgccaaatcaaaaacgatgccgggatgcgagagtgttcagcagtcctgactgtcctagaaccagccacaattgtagagaaaccagaacccatgactgtcacaactggaaaccccttcacattggagtgtgtagtagctgggactccagaactttcagccaagtggttcaaagatggtagagaactatcttcaggcagcagacatcacattacatttgtcagaaacctggcttcccttaagatcccttctgcagaaatgaatgacaagggcttatataccttcgaggtggaaaacagagttggcaaaagcagctgcactgtgtctgtccatgtctcagaccgagttgttccaccgtccttcgtccgaaggcttaaggacacaagtgccacgctcggagcttctgtggttttggagtgtcgagtgtcgggctcagcccccatatcagtcggctggtttcttgatggaaatgagatcattagcagtcccaaatgccagtccagctttgcagataacgtctgcactctgactctgagctccctggagccctctgacactggcgcatacacctgtgtggctgccaatgtagccggccaggatgaaagctctgcagttctgactgtccaagaaccaccatcttttgaacaaacccctgactctgtggaagttttgcctggaatgagcctgacattcaccagtgtcattagaggcacccctcccttcaaggtcaagtggtttaagggcagcagggagctggtgtccggggaggcttgtaccatttctttagaagactttgtcactgagttggagctcctggaggtggagccggggcagagtggagattattcttgcctggtgaccaatgatgccggcagtgcttcctgtaccacgcatctctttgtgaaagaaccagccacttttgtgaaaaggttggctgataccagtgtggagacaggtagccccatcgttctggaggctacttactctggcacaccacctatctctgtgagctggatgaagaacgaatatcctctttcacagtctcccaactgtggcatcaccacaacagaaaaatctagcatcctggaaattcttgagagcacaatagaggattatgcacagtacgcttgcctgatagaaaatgaagccggacaggatatctgcgaagctcttgtgtccgtcttggaaccaccttactttatcgaacccctggaacatgtggaagcagctattggagagcccataactttacagtgtaaagtggatggaacccctgagatcaggatttcttggtataaggaacatacaaagctacggtcagctcctgcatataagatgcaattcaaaaacaacgtggcctccttagtcatcaacaaggtggaccacagtgatgtgggagagtacacctgcaaggcagaaaacagcgtgggggctgttgcttcttctgccgtgctggttatcaaagagcgtaaacttccaccttcctttgcgagaaagctgaaagatgtccacgagactcttggcttcccagttgcttttgaatgtcgaatcaatggctcagaacctcttcaggtgtcttggtacaaggatggtgaacttttgaaagacgatgctaatttgcagatgtcttttgttcatcatgttgccactcttcagattttgcaaactgaccagagccacgttggtcagtataactgttcagcttctaatccgcttgggactgcttcgtccagtgctaagctcattctctcagataaccgtgagattcgccctggaggcaactacaagatgactctggtggaaaatactgccactctgacggtgctcaaagtagccaaaggtgatgctggacagtatacctgctacgcgagcaacgtggctggaaaggactcttgttctgctcaacttggtgtacaaggtttcattaaaaagctagaccaatcacggatcgtgaagcaggatgagtatacaagatacgagtgcaaaataggcgggtctccagaaatcaaggttttgtggtataaggatgaggtggagattcaagaaagcagtaaattccggatgtcattcgaggactcggtggccatcctggagatgcacagtctcagtgtggaagacagcggggactacacctgtgaggctcgcaacgcagcagggagcgccagcagcagcacctccctgaaagttaaagaaccacccgtgttccgcaaaaagccttttccggttgagacacttaaaggagccgatgttcaccttgagtgtgagcttcaggggacacctccctttcaagtttcttggcacaaagacaagcgagaacttaggagtgggaagaagtacaagattatgtctgagaatttgctcacgagcatccacatcctgaacgtagacacggcagacattggggaataccagtgcaaagccacaaacgatgttgggagtgatacctgtgtgggctctgtcactatgaaagcaccaccacaatttgtgaagaagctcaccgacatttctaccatcattggcaaagaagtccagctgcagacaacaattgaaggcgctgagccaatttcagtggcgtggttcaaagacaaaggggaaattgttagagagagtgacaacatatggatttcttactctgaaaacatcgccaccctccagttttcaagagcagaaccagccaatgctgggaaatacacctgccagatcaaaaacgatgctgggatgcaggagtgctacgccacgctatcagtgctcgagcctgctgcaattgtggaaaagccagaatctattaaggtgaccacaggagacacctgtaccttggagtgcacggtatcaggaacacctgagcttagtaccaagtggtttaaggacggaaaggagctcacgagtgacaacaaatataaaataagcttcttcaacaaggtgtctggcctcaagatcatcaatgtggtgcctggcgacagtggggtgtacagctttgaagtgcaaaaccctgtcggcaaagacagctgcaaagtctccattcaagtctcagatcgaatcatccctccctcgttcacaagaaaactgaaagagacgaacggtctgtcgggctcctccgtggtgatggagtgcaaagtgtacggatcacccccaatctctgtcctgtggttccatgacgggaatgagatcagcagtggccggaagtaccagaccacactgacagacaacacgtgtgccctgacggtgaacatgctggaggaagctgacgccggcgactatacatgtatagctaccaatgtggcaggctccgacgagtgtagtgcccctctgactgtacgagagccaccatcttttgttcagaaacctgacccgatggatgtcttaactggcagtaatgtcacgttcacaagcattgtcaaaggctcacctcctttcactgtcagctggttcaaaggtagcactgagcttgtgcctggggccaggtgcaacgtgtctctgcaggactcggtgggtgaactggagctgtttgacgtggatacgtcccagagcggagaatacacctgcatagttagtaacgaggctggcagggcttcctgcacaacacgtctcttcgtaaaagccccagccatatttgtgaagcgactcaatgactacagcatagagaaaggcaagcctctgatccttgaagggaccttctctggaactcctccgatctctgttacatggaagaaaaatggcataaatgtcatagcttcccaacggtgtaatattaccacaactgaaaaatcagccatcctagaaattctgagcagcactgtcgaagattcagggcagtacaactgctacattgaaaacgcttctggcaaggactcctgctcggcccagatcctgattctagaaccaccgtattttgtcaagcagttggagcctgtgaaggtgacggttggtgactctgcctctctacaatgccagcttgctggaactcccgagattggggtctcctggtataaaggagacacaaagctcaggcccactgccacctgcaaaatgcattttaagaacaacgttgcgacactggttttcacccaggttgatagcagcgacagcggagaatatatctgcagggctgagaacagtgtaggcgaggtttcttcatcaactttcctgactgttcaagagcaaaaacttccaccatccttttctcgacaactaagagatgtgcaagagaccgtgggattgccagtggtttttgaatgtgctgtaagtgggtccgagcccatctctgtgtcttggtacaaagatggcaagccgttgaaagacagcccaaatatacaaacatcatttttagacaacatcgccactctgaacatctttaagacagacaggagtctctcgggccagtactcttgcactgctacaaaccccattggctctgcttcttcaggcgccaaactcatcctcacagaggggaagaacccacccttctttgatatccctctggcccctatggatgctgttgtgggagaaagtgctgacctggaatgccatgtcacgggaacacagcccattaaggtaacctgggccaaggacaacagagagatacgaagtggtggaaactaccagatcagctatctggaaaacagtgcccacctgaccatcgtgaaagtggacaaaggtgactctggccagtacacctgctacgccgtcaatgaagtgggaaaagactcctgcacagcccaactcaatataaaagagcgcctcatcccaccgagtttcaccaaaaaactatctgagacggtagaagagacagaagggaactcattcaaactggaagggcgtgtggcagggtcccagcccatcaccgttgcttggtacaaaaataatgtagagatccacccgacctccaactgtgagatcatgttcaagaacaacgcactgctgctgcaggtgaagagggccagcatggccgatgcaggcttatacacctgcaaggcgacaaatgacgcaggctctgccctgtgcacatcgtccattgtcatcaaagagcctaagaagccgcctgtgtttgaccagcaccttgccccggtcacggccagcgaaggtgactctgtacagctcagctgccacgtgcagggctccgagcccattcggatccagtggttgaaagctggtagggaggtaaagccttcggacaggtgcagcttcagctttgctagcggaaccgccatgctggaactcaaggagacagctaaagcagattcaggagactacgtgtgtaaggcttccaacgtggctggaagtgacacttcaaagtgcaaagtgaccattaaagagaaaccagccgcagccccagcagccaagaaagcagccgtggatggaaaactcttcttcgtgtcagagcctcagagcatcagagtagtggaaaaaaccactgccacgtttattgcaaaagttggaggtgacccgatcccgaatgtcaaatggacaaaagggaagtggagacagctgaaccaagggggtcgcattcttatccatcaaaagggcgacgaagcgaagctggagattcgtgacaccacaaaaaccgattctggcttataccgttgcgttgcctttaacaagcacggtgaaattgaaagcaatgtcaacctacaggtggatgaaagaaagaaacaagagaagattgaaggtgatcttcgcgcgatgctgaaaaagactccagccctcaagaaaggatctggggaagaagaggaaattgatatcatggaacttctcaaaaatgtggatcctaaagagtatgagaagtatgcgcgcatgtacggaatcaccgacttccggggcctcctccaagcgtttgagctgctgaaacagagccaggaagaagagactcacagactggaaatcgaggaactagagaagtcagaaagagatgaaaaggaattcgaagaacttgtagcatttattcagcaaaggctgacacagacagagcctgtcactttgatcaaggatattgaaaatcagacagttctgaaagataatgacgccatctttgaaattgacattaagattaattatccagaaatcaagctttcctggtacaaagggactgaaaagctggagcccagtaacaaatatgaaataagcatcgatggtgaccggcacacactcagagtcaaaaactgtcagcctaaagatcagggcaattaccgtctggtctgtggtccccacatcgctagtgccaagctaactgtgattgagcccgcctgggagcggcatctccaggacgttactctgaaggaaggccagacttgtaccatgacgtgtcagttttctgtaccaaatgtgaaatctgagtggttcagaaatggcagagtccttaaacctcaaggcagagtgaaaacggaagtggaacacaaagtccacaagctgaccattgccgatgtccgtgcagaggaccagggtcagtacacctgcaagcacgaagacctcgaaacttcagcagagctcagaatcgaagccgaacccattcagtttacaaagcgcatacagaacatcgtggtgagcgagcatcagtctgctactttcgagtgcgaagtgtcctttgacgacgccatagttacctggtacaaaggaccaacagagctgactgagagccagaaatacaactttagaaacgacggccgctgccattacatgacaatccacaatgtgaccccagatgacgaaggtgtctattcagtaattgctcggctggagccaagaggcgaagcaagaagcacagcggaactgtacttaacaaccaaagaaataaaacttgagatgaagcctcctgatattcccgattccagagttccaatcccaaccatgcccatcagagctgtcccaccggaagaaatccctcctgcggttgctccttccatccctcttttgctgccattacctgaagagaagaagccgccagcaaaacgaattgaagtgaccaaaaagggtgtgaaaaaagataccaaaaaagttgtcacaaagcccaaagaagaggccccaccaccaccagtcccagaagttgccaagaagcctccacctcctactcccatgattccagcaaaagcttctgagattattgacgtgtcctctaaggctgaagaggtaaaaataacaaccatcaccagaaagaaagaggttcacaaagagaaagaggctgtgtatgaacgagaggaagcagtctacgaaaagaaagttcacatagagccttgggaagagccctatgaggaattggaaacggaaccatacacagagccatatgaagaaccctattatgaagaaccagatgaagactatgaagagatcaaggtggaagctaaaaagcaagtccacgaggaatgggaggaggactttgaagaaggacaggagtactatgagagagaagagggctacgatgaaggggaggaagagtgggaagagatttaccatgaaagagaaataattcaggttcagaaggaggttcatgaagaattacatgagaagaaaatcccagccaaagtgcctgaaaagaaagtaccacctcccaaagttgtaaagaagccagtagttgaaaaagttgaaaagactactcggagaatggaggaagaaaaagttcaagtcatcaaagtacctgaagtttctaagaagattgttccacaaaaaccttcccggactccagtgcaggaagaaataattgaagtgaaagtaccagctgtgcacacaaagaagatggttatctctgaagaaaagatgttctttgcttctcacacagaggaagaggtgtctgtctcagtccccgaggtgcaaaagaaaactgtcactgaagagaaaattcacgttgcagtttccaaaaagattgaaccaccacccaaagtccctgaaccacctaaaaagccagttccagaagaagtggtccctgttcccattcctaagaaggtggaacccccagcagccaaagttcctgaggctcccaagaaacctgtgccagaggagaaaaagccagttcctattcccaagaagaaagagccagctgcccctccacaagtcccagaggctccaaagaaacctgctcccgaagaaaagattcctgttcctgtgacaaagaagaaggaagcccctccagctaaagttcctgaagtgcagaagaaggttgtcacagaagaaaaaatagccatcattactcaaagagaggagtcccctccaccagcagaaataccaaagaagaaagttcccgaagaaaaaagacctgttcctagaaaagaggaagtccccccaccaaaagctgaagtttctaagaaaactgttgtagaagagaaaagatttgctgctgaagaaaaactatcggtggcagttcctcagagagtggaactcatgcggcacgaagaggaggaatggacttactctgaagaagaggaaagagtgtctgtttcggtgtatagggaagaggaaagagatgaggaggaagcagaaatcacagagtatgaagtgttggaagagcccgaggaatatgttgtggaagaaaagatgcactttatctctaagaaagtggaagttgaaccagccaaagttcccgaaccaccaaagaaaattgtaccagagaagaaagttcctgcaccagctcccaaaaaggtgccgccagccaaagcccctgaagaatcaaagagaccagttcccgagaagagggctcctgcagaagaggttgggatagaagaacctcccccaaccaaagtggccgaaaggcacatgaaaattacccaggaagaaaaagttcttgtggctgtaactaaaaaggaggcgcctccgagagcgagagtgccagaggaacctaagaaagttgcccctgaagaaagatttcccaagctcaaacctcgaagagaggaggagccaccagctaaagaagtgactgtgacagaagagaagaaatggtcttacacccgagaagaagaaactgtttcagaacatcgggaggaggagtatgaggattacgaagactatgaggagtataaagagtttgaggagtacgaacccaccgaagaatatgaccagtatgacgagtatgcagagcgtgaggtggagcactatgaagagcatgaggaatacgtcacagaacccaagaagcctgtcccagtgaaacctgcccaagaaccggtgcctgctaaacccaaggctcccccaccaaaagtgctaaagaaagctgtccctgaagaaaaagcacccctgcccattcaaaagaaactcaaacctctgccacccaaagctcccgaagaaccaaagaaagttgttgaagaaaaaatacagatttcaattaccaaacgtgaaaagcagcaggtgactgaaccggtcgccaaagtgcctatgaagcccaagagagttgtcccagaggcaaaaatacctgcccctacaaaggaagtggcagtgcctgttagagaggaggtggaagcccatgaagaatacattgtagaggaagaagaggaatatgtccatgaagaggagtatgtccacaaagaagaatatgtccatgaagaagagtacgtccataaagaggaatatatccacgaagaggaagaacaccttcatgaagaggaggagaccatagctgaggaagaggtggtgcctgtggccccagtcaaagtgcctgtggtacccaagaaacctgttccagaagagaaaaaacctgttcctgttcccaaaaagaaggaagcaccaccagccaaagtgcctgagattcccaagaagccagaggaaaaagttcctgtgcctattcctaaaaaggagaaggctccacctgccaaagtcccggaagtgcccaagaagcctgtaccagaggagaagccaccagtacctgttcccaaaaaggtggaaccaccaccagccaaagtgccagaagtgccgaagaaacctgtgcctgagaagaaggtaccagcgcctactcctaagaaagtagaggctcctcctgcaaaagcgccaaagaaacgggaggtagtcccagttcctgtggctctacctcgggaagaagaagaagaagaagtgccatttgaggaagttcctgaagaggaaattctacctgaggaagaagttccatctgaggaggaagctccacctgaagaagttccaccagaggaagaggaagttcttcctgaagaagaggaagttcttcctgaagaagaggaagttcttcctgaggaagaggaagttcaacctgaggaagaagctcttccagagattaaacctaaggtgccaaaacctgcaccagtgccaaagaaaactgtccctgagaagaaagtccccgttcctgttcctaaaaaagtggagcctccaccacctcccaaagtcaaaatgccctatctgctatttgtgaatgtcagttctgttattgctgtacacggcgtccttgtgtttgtgagactgaaatttcaaaatatctttaaagttcctgtggttcctaagaagcctgaaccagaaaagaaggtgcctgtccctgcccttaagaaagcagtggtccctcctgccaaagttcctgaggtgtctaagaaggtggaagaaagacggatcatcccccctaaagaagaggaagttccaccagctgaagcacctgaagtggtgaagaaagcagtacccgaagctcccactcctgtccctaagaaagcggaggcaccccccgcaaaagtgccaaagaaaatccctgaggaaaaggttcccgtgccggtccagaaaaaagaggccccaccagccaaagtgcctgaagtgccaaagaaagtcccagaaaagaagaaaatccctgaaaagaaagtccctgtgcccaaaaaggaagctgttccaccggctaaagggaaagctgtttttgaagaaaaaatatcagttgcctaccagcaagaagaactagtccaagaaagaatagagctagaactcgtggaagccaaagtggaagaggctttcgaagaagaggagttccacgaggtgcaggaatactttgaggaagaggagttccacgaggtggaggagttcatcagggtggaagagcgcaggttccaagaagagcacaaagtggaagaagtccacagggtcattgagttcctagaggctgaagaagtggaagtatacgaaaagcccaaaattccacctaaaaaagtacctgaggtgaccaagaaaacggtggttgaagaaaaaatccgtgctcctgaagaaccgaaggtgccggcacctaaaggtacctgcctctgctgcttctccagcagcagcaaatccccgtgcatcactttccacaaaggagagaaagagcactctttcctcaggaccaggaggcagctgcaaatggcagaaattgccatttatattctatcctacaatcttgccatttttgctctggtggaaaacatcattaagtctacagcacccgaagtaccaaagaaaatcactccagaagaaaaagtccgtgaagctgttcctaaaaagcctgaagttccaccacctaaagttcctgaggtgcctaagaaaattattcaagaagaaaaattacccgttgttcttcctgaagacacagagatatacaagtctgaaacaacccgggaagcgtttccagagctgaagtcatataaggctgtccctgaaattcctgagcctccttcacctgaagtgcccgaggctcccagagaagttgtggccaaaaagaaagtgctccctccccaagtgccggaagttgtacctgtgaaagtgcccgaggagcccaaagaggtcatccctgaaaagaaagtgtccctggtgcctcctaaaaagccagcagccccacctgtcacagtgccagaggcacccaaggaagctgcccctgagaagaaagtgccagtggcacctaagaaaaagccagaagccccacccgtgaaagtgccagaggcacccaagaaagttgtccctgagaagaaactgccagtagcagctcctaaaaagcctgaagccccagctgctgaagtacccgaggtgccaaagacagctgttccccaaaagaagatccctgaggccattccccccaaaccggaaagtcctccccttgaagtgcctgaagtaccacccaaggaagtcactcctgaaaagaaagttccagcagcacctcccacgaagccagaaattccacctcccaaagtgcctcaagtccaagagactgtccctgaaaagacaagaccagtgggacctcctaaaaagccagaagccacaactgtcccagtgcctgaagtccaagagactgtccctgaaaagacaagaccagtgggacctcctaagaagccagaagccacaactgtcccagtgcctgaagctgatcaagcagttgtcccagaaaagaaagtccccagggtcccgcccaaaaaagttgaagccccacctattacagtgcctgaggaacctaaagaggtcatccctgaaaagaaagtgtccctggtgcctcctaaaaagccagcagccccacctgtcacagtgcctgaggcacctgaagaggtcttctctgaagacgaagagaccctggcaccccctcaagagccagaggccccacctgccaaagtgccagaggctcccaaagaagttgttcctgaaaagaaagtctccgtggtgcctcccaaaaagccagaagccccacctgccaaagtgccagaggcacccaaggaagctgcccctgagaagaaagtgccagtggcacctaagaaaaagccagaagccccacccgtgaaagtgccagaggcacccaagaaagttgtccctgagaagaaactgccagtagcagctcctaaaaagcctgaagccccagctgctgaagtacccgaggtgccaaaggcagctgttccccaaaagaagatccctgaggccattcctcccaaaccagagagtcctccccctgaagtgtatgaggaacctgaagaggagattgtcccagaagagcctccagaggaggctgtggaagaaccagtgccagctccccctccaaaagtgacagagccacctaagaagcctgtccctgagaagaaagcgcctcctgctgttgtcaagaaacctgaacccccaccagcgaaagtgcctgaagtgcctaaggaagctccccctgaaaagaaagtgcctcccaaaaagccagaagccccacctgctaaagtgccagaagttccgaaagaagttgtcacagaaaagaaagtggctgttcccaaaaagccagaagtcccgccagccaaagtatatgaagaaccggaagaagtcactgctgaggaagaggagccagcccctgctgtagaagaggaggaatacgaagctccccctccccctgcaccagtgcctgaagagcctaagaaggttgtcccagagaagaaatttcctgtcatcaaaaaaccagaggctccccctcctaaagtgttgtccagacttgcagagctaatgtgtctatcttatgcttttatattaaacactactaatatctttaaagtacctgaggtgccaaagaaagctgtgcccgtgaagaaagttccggttgttaagaagccagaaccaccagaagctgaagtccccgaggtgccgaagaaacttgttccagtcaagaaggaacctgtgcctgttaccaaaaaaacagaagtcctgccagaaaaagtaccggaagcacccaagaaaattaccccagaaaagaaagagtctgttcccgtgcctgaagagccagaggcccctcctgcctcagtggaagagactcctgaggagacaatctatgaagagaaagcaaccattaccattggtagaaaagagacgccccctgttgaagaacgcgaaattgaaaagtttattcaacctgaagaacccgaactggaaccagagccagaagaaatcccagtacaagaacctgagccagagaagaaggttatcgagaaaccaaaactcaaaccaagaccccctgcacgtcctccttctccacctaaggaagatgtgaaggagaaaatgttccaacttaaagctgtttcaaagaagaaagttcctgaaaaacccgaggttgtggaaaaagtggagcctgcaccactaaaagtgcctacagctgaaaagaaagttcgtaaattacttcctgaacctaagccgcagccaaaggaagaggtggtgctgaaaagcgttctaagaaagaaacccgaggaagaagaacctaaagtagaacctaaaaaagtagaaaaagctaaaaaaccggaagagccacagccacctccaaaagccgttgaagttgaagctcctccagagcctacaccaaaggaaaggaaagttccagaaccggccaaagttcctgaaattaagccagcgatacctctccctggacctgaaccaaagccaaagcctgagccagaggtgaaaaccatgaaagctccacccatcgagccggcacccactcccatcgctgcccccgtgacagcgcctgtggttgggaagaaagcagaagccaaacctaaggatgaggctgccaagccaaaaggtcccatcaaaggtgtagccaaaaagactccttcaccaatagaagctgaaaggaaaaagctcagaccaggaagcggtggagagaaacctccagacgaagctccgttcacttaccaactcaaggccgtgccactgaaattcgtgaaagaaatcaaagacatcgttttgacagaggcagagtctgtgggctcttctgccatcttcgaatgtttggtctccccatccactgccattacaacctggatgaaggacggcagcaacatccgtgagagcccaaagcacagattcattgcagacggcaaagacaggaagctgcacattatcgacgttcagctgtctgatgctggtgaatacacctgtgtgctacgcttgggaaataaagagaagacgtccactgctaagctcatcgtagaagaacttcctgtgcgctttgtgaaaacactggaggaggaagtcacggtggtcaaggggcagccgttgtacttgagctgtgagttgaacaaagaacgcgatgtggtctggaggaaggatggtaagattgtggtggagaaacctggcaggatcgtgcctggtgtcattggcctgatgcgggccctgaccatcaatgatgctgatgacactgatgccggaacatacactgtgactgtggaaaatgccaacaacctggaatgttcttcttgtgtaaaagtagtagaaatcattagagaatggcttgtgaaacctatccgagatcagcatgtgaagcccaagggaacagctgttttcacctgtgacatagccaaggacacgccaaacattaagtggttcaaaggctatgacgagatccccttggaaccaaacgacaagactgagatactgaaagagggaaaccacctctttctcaaggttaagaatgctatgccagaagatattgatgagtatgcagtggaaattgaagggaaaagatacccagcaaagctgacacttggagagcgcgaagttgagctacttaagccgatagaagatgtcaccatttatgagaaggaaagtgccagctttgatgcagaaatctcagaggaagacattcctggggagtggaagctgaagggcgagcttctgcggccctcgcctacttgtgaaatcaaagctgaaggtgggaagcgcttcttaactttgcacaaagtgaaactggaccaagctggcgaagtcctctaccaggcttgcaatgcgatcacaactgccattctgacagtcaaagaaatcgagcttgactttgctgtacccctgaaggatgtgactgtcccagagaagagacaggctcggtttgaatgtgtcctcaccagagaggcaaatgtcatatggtctaaagggcctgatataatcaaggcatctgacaaatttgatattattgctgatggaaagaaacacattcttgttatcaacgactctcagtttgacgatgaaggagtctatactgcagaggtggagggcaagaagacgtcagcacaattatttgtgacaggcataagacttaagttcatatcaccactggaagatcaaacagtaaaagaaggccaaacagcaacttttgtctgtgagctctctcatgaaaaaatgcacgtggtctggttcaaaaacgatgtcaagctacacacaaccaggacagtgctcatgtcttctgagggaaagacttataagctggagataagggagaccacactggatgatatctcacagatcaaagctcaagtgaagaacctcagctctacagccaacctgaaggtcttggaggccgatccctacttcaccgtgaaattacacgacaagactggcgtggagaaggacgagatcattcttaagtgtgaagtgagcaaagatgttccggtcaaatggttcaaagacggggaagagattgtgccttcgcccaaacattctgtcaagaccgacggcctgcgccgcatcttaaagatcaagaaggcagagctcaaagacaaaggggaatatgtgtgcgactgcggtacagacaccaccaaggccaacgtcactgttgaggctcgactcataaaagtggagaaacccctgtacggcgtggaagtgtttgtgggtgaaaccgcccgctttgaaattgaactgtctgaacctgacgtgcatggccagtggaagttaaagggagagcctttgactgcttctcctgactgcgaaatcatcgaagatgggaagaaacatgtcttggttctgtataactgtcagctggatatgaccggggagatatccttccaggccgccaacgctaaatcagcagccaacctgaaagtgaaagaactgccgctcattttcatcacccctctgagtgacgtcaaagtctttgagaaagatgaggcgaagtttgagtgtgaagtatccagggagcccaaaacattccgctggctgaaaggaacccaggaaatcactggtgatgacagatttgagctcatcaaggatggcaccaggcattcattggtgatcaagtcagcagcttttgaagatgaggccaaatacatgtttgaagctgaagataaacgcacaagcggcaaactgatcattgaaggaatccgtctcaaattcctgaccccactcaaggatgtgacagccaaagaaagggaaaatgccgtgtttactgtggagctgtcccatgacaacatcccagtgagctggttcaagaacgaccagcgcctgcacaccagcaagcgggtctccatgcatgatgaagggaaaacacactccatcacgttcaaagacctgtctattgacgacacctcccaaattagagtggaggccatggggataagttcagaggctaagctcactgtgctggagggagacccatacttcacaggaaagcttcaagattacacaggcgtggagaaggatgaagtgattcttcagtgtgaaatcagcaaagcagacgcacccgtgaaatggtttaaggacgggaaggaaattaagccgtctaaaaacgttgttatcaaggctgacggcaagaaacgcatgctgatcctgaagaaggccttgaaatcagatatcggccaatatacctgtgactgtgggacagaccagacctctgggaagctggacattgaagatcgggaaattaaactggtgcgacccctgtacagcgtggaggtgatggagaccgagacggcccgctttgaaactgagatctctgaagatgatatacatgccaactggaaactgaagggagaggcactgctccaaacacctgaatgtgaaattaaagaagaaggcaagatccacgtccttatcttacacaactgccgcctagaccagactggaggtgtagatttccaagctgccaatgtcaaatctagtgcccacctccgagttaaaccacgggtaattggtctgctgaggcctctaaaggatgttacagtgaccgcaggggaaacggccacctttgactgcgagctctcctatgaggatatcccagtggaatggtacctcaaagggaagaagctggagcctaacgataaggtggtgacacgttcagaaggaagagttcacacgctcaccctgagggatgtgaagctagaagatgctggcgaagtccaactaactgcaaaggatttcaaaactcaggccaatctctttgtgaaagaacccccggttgagttcactaagcctcttgaggaccagacggtcgaagaggaggccactgcagtactggagtgtgaagtatccagagaaaatgccaaagtgaaatggttcaaaaatgggacagaaatcctcaaaagcaagaagtatgaaatcgttgctgatggcagggtcaggaagctcattattcatggttgtaccccagaggatatcaaaacgtacacttgtgatgctaaagattttaagacctcctgtaacctgaatgttgttcctcctcatgtggaattcttaagaccactcacagacctccaagtcaaagaaaaagaaactgctcggttcgagtgcgaaatttccaaagaaaatgagaaggttcagtggtttaaagatggtgctgaaattaaaaagggcaaaaagtatgacatcatttctaagggagcagtacgaattcttgtcatcaacaaatgtctactgaatgatgaagcagaatattcctgtgaagtgaggacagcaagaacttccggcatgctgacagtcctagaagaagaagctgtcttcacaaaaaatcttgccaaccttgaagttagtgaaggagacactatcaaactggtgtgtgaagtctccaagcctggggcagaagtgatttggtacaaaggggatgaggagatcatcgaaacagggagatttgaaatacttactgatggaaggaagagaatcttgatcattcagaatgcgcagcttgaggatgcaggcagctacaactgtcgactcccaagttctcgaacggacagcaaagtcaaagtacacgaacttgctgctgagttcatctcgaagcctcaaaaccttgaaattcttgaaggagaaaaggctgagtttgtctgcactatctcaaaggaaagcttcgaagttcagtggaagagggatgatcagacacttgaatctggagataaatatgacatcattgctgatggcaaaaagagagtcctagttgtaaaggatgccacattacaagacatgggcacttacgtagtcatggttggggctgccagagccgcagctcacctgacagtcattgaaaaactcaggatcatagttcctcttaaggacaccaaggtgaaggaacaacaagaggttgtcttcaactgcgaagtcaatactgaaggtgccaaagccaaatggttcagaaatgaagaagccatatttgatagttcaaaatacatcattctccaaaaagacctggtctacaccctcagaatcagagatgcacggttagatgaccaagccaactttaatgtgtctttgaccaatcacagaggtgaaaatgttaaaagtgcagccaatctaatagtggaagaggaagatcttaggattgttgaacctcttaaagatattgaaacaatggagaagaagtcagtcacattctggtgcaaggtgaatcgtctcaatgtgacactgaagtggaccaaaaatggagaagaagtggcttttgacaaccgtatatcataccgaattgataagtacaaacactctctaatcatcaaggactgtggcttcccagatgaaggtgaatacgtcgtcactgctgggcaagataaatccgtggcagagctgctcatcatagaagccccaacagaattcgtggagcacctggaagaccagacggtcacagagtttgatgacgctgtcttctcctgccagctctccagagagaaagcgaatgtaaaatggtacagaaatggaagagaaatcaaggaaggcaaaaaatacaagtttgagaaggatgggagcatccacaggctcatcataaaagactgcaggctggaggatgagtgtgaatacgcttgtggtgtagaggaccgcaagtcccgagctagactttttgtagaagaaattccagttgagattatcaggcctcctcaagacattcttgaagcccctggtgcagacgttatcttcttggctgagctcaacaaagataaagtggaggtccaatggcttagaaataacatgatcgtcgtccagggtgacaagcaccagatgatgagtgaaggaaagatacacaggctacagatttgtgatattaagccacgtgaccagggcgaatacagattcattgccaaagataaagaagccagggctaaacttgaattagcagctgcacctaaaatcaagacagctgatcaagatctcgtcgttgatgctggccagcctctgacaatggtggtaccctatgatgcctaccccaaagcagaagctgaatggtttaaagagaacgaacctctatctacaaaaaccgttgacactacggctgagcagacttctttcagaatctcagaagccaagaaggacgacaaggggaggtataaaatcgtgcttcagaacaagcatgggaaagcagagggcttcatcaatttacaagttattgatgttcccgggccagttcgtaacttagaagtgacagaaacatttgatggtgaagtaagcctcgcctgggaggaaccactaacggatggtgggagcaaaatcataggctatgttgttgaaaggcgtgatatcaagagaaagacctgggttctggtcactgaccgagcggacagctgtgagttcactgtcactggactacagaaaggaggagtggagtacctgttccgtgtgagtgcaaggaacagagttggcactggagaacccgtagaaactgacagtcctgtagaagcaaggagtaaatatgatgttccaggccctcctttgaatgtaaccatcaccgatgtgaatagatttggtgtctcactaacatgggagccaccagagtacgatggaggtgctgaaatcacaaactatgtgattgagctgagagacaagacttctatcagatgggacactgccatgaccgtaagagctgaagacctgtcagcaactgtcactgatgtggttgaaggacaggagtatagtttccgtgtcagagcccagaaccgaatcggagttgggaaaccaagtgcagccacaccctttgtcaaagttgctgatccaatagagagaccaagtcctcctgtgaacctaaacgcctcagaacagacacagtcatcagttcagctcacctgggagcctcctctgaaagatggaggcagccccatactgggctacataattgaaagacgtgaagagggaaaagacaattggattcgctgcaatatgaaacctgtccctgaactgacttacaaggtcactggattgcaaaaagggaacaaatatttatatagagtgtctgcagaaaatgcagctggtgtttcagatccatctgagatcctcggtcctctcactgctgatgatgcgtttgttgaaccaacgatggatttaagtgcattcaaagatggtttggaagtcatagttcccaatcccatcaagatcctggtcccaagcacaggctatccaagaccaaaagcaacctggacttttggagatcaagtacttgaagagggggatcgtgtgaaaatgaagaccatatcagcctatgccgagcttgtcatttctccaagcgaacgaacagacaaaggcatttacacactcacgttagaaaatcctgtgaagtcaatttctggagaaatcaatgtcaatgtaattgctcctccaagtgcgcccaaagaactgaaatttagtgatataacaaaggattctgtacatttgacttgggaaccaccagatgatgatggagggagtccactaactggatatgttgttgaaaagagagacatgagccggaaaacatggactaaagttatggactttgttactgatctagaattcacagttcctgatcttgttcaaggaaaggagtatctattcaaagtctgtgcccgaaataagtgtggccctggagaacctgcatatactgatgaacctgtaaatatgtctgcccctgcaacggtacctgacccaccagagaatgttaaatggagagacaggacagccaacagcatcttcctaacatgggatcctcctaaaaatgatggtggctctcgtatcaaaggatatatagttgaaaaatgtccacgtggttctgataaatgggttgcctgtggagaacctgttccagatacaaaaatggaagtgacaggtcttgaggaaggcaaatggtatgcctaccgtgtgaaggccttgaacaggcaaggtgctagcaagccaagcaaacccactgaagagatccaggcggtggacacacaggaggcccctgagatcttcctggatgtgaagctcctggctgggatcactgtgaaagctggaacgaagatcgaacttcccgccacggtgactggaaaaccggaaccgaaaataacttggaccaaggctgacacccttctgaagccagaccagagaatcaccattgaaaacgttcctaaaaaatccacagtgacaatcacagacagtaagagaagtgacacaggcacatatatcatagaagccgtgaacgtctgtggccgggccactgctgtggtagaagtgaatgtcttagataaacctggaccaccagctgcctttgacatcacagatgtaaccaatgagtcgtgtcttctgacctggaacccaccaagagacgatggcgggtctaagatcacaaactatgtggtggagagaaaagcaacagacagtgatgtgtggcataagctctcatcaaccgttaaggacacaaacttcaaggcaaccaaattaacacccaacaaagagtacatcttcagagttgctgcagaaaatatgtatggtgttggtgagccggttcaagctgctccaataatagccaaataccagtttgatccacccggacctccaactcgcctagaaccttccgacatcactaaagatgcggtgacgctcacatggtgtgagccagatgatgatggtggcagtcccatcactggatactgggttgaaagattagatcctgacactgataaatgggttcgatgcaataagatgccagtgaaggacacaacatacagggtaaaaggtctcaccaataagaaaaagtacagattccgcgtgcttgctgaaaatttggcagggccaggaaaaccaagtagatcaactgaaccaatcttaataaaggatcccatagatcctccatggccccctggaaaaccaactgtaaaggatataggcaaaacctccttagtattgaactggaccaagccagaacacgatggaggggcaaagattgagtcttacgtcattgagatgctaaagaccggaacagacgagtgggtcagggtggctgagggagttccgaccactgagcatttgctcacagggctaatggaaggccaggaatactcattccgagtgagagccgtgaacaaggctggagagagtgagcccagtgaacccagcgaccctgtgctttgccgggagaaactatatcctccatcaccacctcgctggctcgaagtgattaatatcacaaaaaatacagctgacctaaaatggacagttccagagaaagatggagggtcacccatcaccaactacattgtggaaaagagagatgtgagacggaaaggctggcaaacagtggacaccactgtcaaggacaccaagtgcacggtcaccccactgacagaggggtctctgtatgtgttccgagttgctgcagaaaatgccataggacaaagtgactacacagaaatcggagattctgtcctggccaaagacaccttcaccacccctggaccaccctatgccctgacagtggttgatgtgacaaaacgacatgttgacctaaagtgggagccacctaaaaatgatggcggaagaccaatacagagatacatcattgagaagaaagaaaaattaggtacccgttgggtgaaagccgggaagacctcaggccctgactgtaacttcagagtaactgatgtcattgaaggaacagaagtccagtttcaagttcgggcagaaaatgaagcaggagttggtcacccaagtgagcccacagaaattctgtcaatcgaagacccaacaagtcctccttcacctccgcttgatctacatgtgactgatgctgggagaaaacacattgccattgcttggaaaccaccagagaaaaatggcggaagtcctatcataggctaccatgttgaaatgtgtccagtaggcacagagaaatggatgcgagttaattctcgcccaataaaagatctgaagttcaaggttgaagagggtattgttccggacaaagaatatgttctgagagtgagagctgtcaatgctgtcggtgtcagtgagccatctgaaatctccgaaaacgtggtcgccaaagacccagactgcaaaccaactattgatctagagactcacgacattgttgttatcgaaggagaaaagttaaacatccctgtgcccttcagggctgtcccagtgccaaccgtgagctggcataaagatggcaaagaagttaaagcaagtgacagattgacaatgaagaacgaccacatctctgcacacctcgaggttcccaagagtgtccatgcagatgctggagtgtacaccatcaccctggagaataagctcggctcagcaacggcttcaatcaatgtcaaagtcataggtctacctggtccatgcaaagatattaaagcaagtgacataaccaaaagttcttgtaagttaacatgggaacctccagagtttgatggtggaagcccgattcttcattatgtcctggaacggagagaagcagggaggaggacatatatcccagtcatgtctggtgagaacaaactgtcttggaccgtaaaagatctcataccaaatggtgaatacttcttccgagtaaaagcagtcaacaagattggcggaggagaatacattgaactcaagaatcctgtcattgctcaagatccaaagcaaccacctgatccacctgtagatgttgaggttcataatcctacagctaaggcaatgactatcacgtggaagccacccttgtatgatggaggaagcaagataatgggttacatcatagaaaagatcactaagggtgaggatagatggaagagatgcaatgaacatctggtccctgtcctgacctacacagcgaaaggactcgaggaggggaaagagtaccaattccgtgtgcgagcggagaacgctgctggtattggtgaaccttcccgggccactcccccaaccaaagctgtcgaccctattgatgccccaaaagtcatcctcagaacaagcctggaagtaaagcggggtgatgaaatagcacttgatgcaaccatctctggctcaccatacccaacaatcacatggataaaagatgaaaatgtcattgttccagaggaaattaagaagcgagcggcacccccagttaggaggaagaagggcgaggctgaagaggaggagcccttttccctccctctgacagaacgtctgagcatcaacaatagcaaacagggagaatctcagctgcgcatccgtgactctctgcggcctgaccatggccagtacatgatcaaagttgagaatgatcacggtgttgcaaaagctccttgctccgtcagtgtgttagatacaccaggaccaccaatcaactttgtatttgaggatattagaaaggactctgtcctgtgtaagtgggaaccaccgcttgacgatggtggcagtgaaatcattaactataccttggaaaagaaagacaagaccaagcccgactcagactggattgttatcacatcaacactcagaaactgcaaatattcagtaacaaaactgattgaaggaaaagagtacctcttccgtgtaagagctgaaaataggtttggacctgggccaccatgtgtttcaaagccacttttagccaaagatccatttgaaccacctgatgcaccagataaacccattgtggaagatgtcaccagcaacagtatgctagtaaaatggaatgaaccgaaagataatggaagccccatcttgggttactggcttgaaaaacgtgaggtcaatagtacacactggtctcgtgtcaacaaaacccttctcagttctttgaaaaccaaggtagatggcttgctggaaggactcacctatgtcttccgagtttgtgctgaaaacgctgctggacctggaaagttcagcccaccttcggatcctaaaacagctcgcgatccaatctctccacctgggccgcctgtcccgagagttgctgatacaagctctacaaccattgagctggagtgggaacccccagctttcaatggtggtggggaaattatgggctactttgttgataagcagctggttggcacaaatgagtggtcacgctgcacagagaagatgatcaaagtccgtcagttcactgtcaaagaaatccgagagggtgccgactacaaacttcgagtgagtgctgtcaatgcagcaggcgaaggaccacctggagaaacagaacctgttactgtggctgagccacaagacagttgttctccttcaacagagcctccaactgtggaactagatgtttctgtcaagggtggaatacaaatcatggctgggaagactctcagaatcccagcggaggtgactggccgtcctgtgcccacaaaagtatggaccatcgaagaaggggagctagataaagagcgtgttataatagagaatgtcggaaccaaatctgaactaattatcaagaacgcattgagaaaagaccatggcagatacgtgatcacggcaacaaacagctgtggttccaaatttgccgcagtccgggttgaagtgttcgatgtccctggcccagttcttgacctcaaaccggttgtaacaaacagaaagatgtgtctgcttaattggtccgatccagcagatgatggcggaagtgacatcacagggtttataattgaaaggaaggatgctaagatgcacacttggagacagcccatcgagactgagagatccaagtgtgacatcacaggccttatagagggacaagaatacaagttccgtgtcattgccaagaacaagtttggctgtgggcctcctgttgaaataggaccaattcttgcagttgatccactaggccctccaacatctcctgaaaggctcacatacacagaaagaacaaaatccaccatcacacttgactggaaagagccacgcagcgatggtggcagtcccattcaaggatatatcattgaaaaacgccgccatgacaaacccgactttgaaagagttaacaagagactctgcccaaccacatcatttctggttgaaaatcttgatgaacaccaaatgtatgagttccgtgtcaaagccgtcaatgacgttggtgaaagtgaaccatctctgcctcttaacgtagtcatacaggatgatgaagtccctcccactattaagttgcgcctggctgttcgaggagacactatcaaagttaaggcaggggagccagttaacatccctgcagacgtgaccggcctccccatgcctaagattgagtggtccaagaatgaaaaggtgattgataaacctacggatacactgaatataaccaaagaagaagtctcccgaagtgaggcaaagactgagcttagcatccctaaagcagcccgagaggacaagggcacgtacacaatcacagcttccaatcgtcttggctccgtattccgcaacgttcatgtggaggtttatgatcgtccatctccacccagaaacctcgctgttactgacatcaaagctgagtcttgctatttgacgtgggatgcccctctagacaatggaggcagtgaaattactcattacatcattgacaagcgtgatgccagcaggaagaagtccgaatgggaagaagtcactaacactgctgttgagagaagatacgggatctggaagcttatccccaatggtcagtacgagttccgagtgagggcagtgaataaatatggaatcagtgatgaatgcaaatcagacaaggtcgtcattcaagatccctaccgcctccccgggcctcctggaaaaccgaaagtcttagaacgtaccaaaggatctatgcttgtgagctggacccctcctctggacaacggagggtctccaattactggctactggctagagaagagagaggaaggtggtacctactggtcacgtgttagcagagcaccaataaccaaagtaggactgaagggtgtggaattcaatgttccgcggttgattgaaggcgtcaaatatcaatttagagccatggcaataaatgctgcaggaattggccctcccagtgaaccatcagacccagctgttgcaggagatcctatataccctcctgggccaccttcttgcccagaggtcaaagataaaacaaaatcaagcatctcactagcatggaaacctccagccaaagacggtggcagcccaatcaaaggctacattgtagagatgcaagaggagggaaccacggactggaagccagtcaatgaacccgataaacttctcactgcctgtgaatgtgtggtgcctaatctgaaagagctcaggaagtacaggttcagagtgaaagctgtcaatgaagctggagagtctgaaccaagtgacacgaccggagagatccctgccactgatatccaagaagttccagaggttttcattgacattggcgcacaagactgcctggtttgcaaagctggctcacaggtcaaaattcctgctgtgatcaagggacgccccacaccaaaatcatcttgggaatttgatggaaaagcaaagaaggcaatgaaggatggagttcatgatatacctgaagatgcacagctggagacggccgaaaactcatcggtcatcattatcccagagtgtactcgagctcactcgggcaaatacagcatcacagccaagaacaaagcaggacagaaaactgccaactgcagagttaaagtcatggacgcaccaggccctcccaaagatttgaaggtcagtgacatcacaaggggtagttgccgcctctcatggaagatgccagatgatgatggaggtgataggatcaaaggctacgtcattgagaagaagaccatcgacgggaaagcctggacgaaagtcaatccaaattgtggaagcaccacatttgtggtaccagatcttatctctgagcagcaatacttcttccgtgttcgagcagaaaaccgttttggaattggcccacctgcagaaaccatccagaggaccactgccagagacccaatatatcctcctgatccccctatcaaactcaagattggtctcataacaaagaacacagtgcacctgtcgtggaaacctccaaagaatgatggtggctctcctgtcacccattatattgttgagtgtttggcttgggaccctaccgggaaaaagaaagaagcctggaggcagtgcaataggcgtgatgtggaagaactggagttcaccgtggaagacctcatagagggaggggaatatgaattcagagtcaaagccgtcaacgaggccggggtcagcaagccttcagccactgttggtcctgtgattgtcaaagaccagacatgcccaccagccattgagctaaaagaattcatggaagttgaagaaggaactgatgttaacattgtggccaaaatcaaaggtgtgccgttcccaactctcacctggttcaaggctccgccaaagaaacccgacagcaaagagcctgttgtttatgacacccatgtcaacaaacaggtggtggatgacacttgcactttagtcattcctcagtctcgccggagtgacactggcttatattctatcacagccgtaaacaacctggggacagcatcaaaggagatgagactcaatgtccttggtcgtcctggcccccctgtgggacccataaagtttgaatctatttcagcggatcagatgacattatcttggcttccacctaaagatgacggtgggtctaagattacaaactatgtcattgagaaaagagaagccaacagaaagacatgggtacgtgtctccagtgaacctaaagaatgcatgtacacaattcccaaattgctagaaggccatgaatacgtcttccgaatcatggcccagaataagtacggcattggagagccacttgacagtgaacctgagacagcacggaacctcttctctgtccctggagctccagataaaccaacagtgagcagcgtcactcgcaactccatgactgtcaactgggaagagccggaatatgatggaggctctcctgtgacagggtactggttagaaatgaaagacaccacttcaaagagatggaagagagttaaccgagatcccatcaaagccatgactctaggtgtttcttacaaagtgactggccttattgaaggatcagactatcagttccgggtatatgcaatcaatgccgctggtgtgggtccagcaagtcttccctcagatccagtgactgctagagatccagttgctccccctggtcctccattccccaaagtgacagactggacaaaatcatctgtggacttagaatggtctcctccactaaaagatggcggatccaaaatcactggctacattgttgagtataaggaagaaggaaaagaagaatgggaaaagggtaaagataaagaagtgagggggacaaaactggttgttactggattaaaagaaggagccttctacaaattccgtgtgagagcagtcaatgttgctggtgttggggaacctggagaagtcacggacgttattgaaatgaaggacagaattgtgtcgcctgaccttcagcttgatgccagtgtcagagacagaatagtggtccacgccggaggggtgatccgtatcattgcctatgtatctgggaagccacctcccactgtcacctggagtatgaatgaaagagccttgcctcaagaggccgccattgagaccacagcaattagctcatccatggtcatcaagaactgccagaggagccaccaaggcgtctactctcttcttgccaaaaatgaaggcggagaaagaaagaagacaattattgttgatgtactagatgtcccaggacctgttggaataccattcctctctgacaacctaaccaatgactcctgcaaactgacatggttctctccagaagatgatggtggctctccaatcaccaattatgtcattcagaagcgggaagctgaccgcagggcatggacccctgtgacatacacagtcactcgacaaaatgctactgttcagggccttattcaaggaaaatcctactttttccgaattgcagctgagaatagcattggcatgggcccatttgttgagacaccaaatgcacttgtcattagagacccaataactgtgccagagagacctgaggacctggaagtcaaagaagtcactaaaaatactgtgtctttgacttggaaccctcccaagtatgatggcgggtcagaaattataaactatgtcctagaaagccgcctcattggtactgagaagttccacaaagttacaaatgacaacctgcttagcaggaaatacactgtgaaaggcttaaaagaaggcgatacatatgagtaccgcgtcagtgccgtcaatatcgttggacaaggcaagccatcattttgcaccaagccaatcacttgcaaggatgaactggctccacctacacttgacctcgacttcagagataagcttaccgtccgagttggtgaatctttcgccctcactggccgatactcaggcaaaccaaagcctaagattgattggttcaaagatgaagctgatgtactggaagatgatcgtactcacataaagaccactcccacgacacttgctcttgagaagacaaaggccaaacgctcagattctgggaaatactgtgtagttgtggagaacagtacaggctccaggaaaggtttctgtcaagtcaatgttgttgatcgtcctggaccaccagtaggacctgtcatttttgatgaggtgaccaaagaatacatggttatttcttggaagccacctctagatgatggaggaagtgaaattaccaattatattattgagaagaaggagctcggtaaagacatctggatgcctgtgacatctgccagtgccaaaactacatgcaaggtccctaaactgcttgaaggaaaagattacatcttccggattcatgcggaaaatctatatggaataagtgaccctctggtgtctgattcaatgaaagccaaagatcgattcagagtccctgatgcacctgagcagccagttgtcacagaggtcaccaaagactcggcattagtaacctggaacaagccaaatgacggaggaaagcccatcacaaactacatcctggaaaagagggaaactatgtctaaaagatgggttcgagttaccaaagagcctattcatccatacactaagtatagggttcctgatcttctagaaggatgccagtatgaattccgtgtttctgcagagaatgaaattggtattggagatccaagtccaccatccaaaccagtctttgctagagacccaattgctaaaccaagtccacctattaatcctgaggcaatagatacaacatgtaattcagttgagctaacttggcagccaccacgtcacgacggtggtagcaagatcctgggttatatcgtggagtaccagaaagttggggatgaagagtggagacgagccaatcacactcctgaatcatgccctgaaactaaatataaagtcactggcctcagggatggtcagagctacaagttccgagtactggcagtcaacgaggctggtgaatcggacccagcccacgttcctgaaccagttctagtaaaggaccgacttgaacctcctgagcttatacttgatgctaacatggcaagagaacaacacattagagttggtgacaccctaagacttagtgccatcatcaaaggtgtgccattccccaaagtaacctggaaaaaagaagacagagaggctccaacaaaagcccaaattgatgttactccagttgggagcaagcttgaaatccgtaatgctgcccacgaagatggtggtatttattccctaactgtggagaatccggcgggtacaaagacagtctcagtcaaagtattggtcttagataaacctgggccacctagagatctggaagtcagtgaaattaggaaagattcttgttacctgacttggaaggaaccactggacgacggtggttctgttgtaaccaattatgtggttgagaggaaagatgttgccactgcccagtggtcccctctttccaccacgtcaaagaagaagagccatatggctaaacatctgactgagggcaatcagtacctcttccgagtagctgctgagaaccaatacggacgtggtccttttgttgaaacacctaagcccatcaaggctctggatcctctccatcccccagggccacccaaggatctgcaccacgtagatgtcgacaagactgaagtctctctcgtttggaataagccagatcgtgatggtggttctccaatcacaggatacttagtggaatatcaagaagagggtgacaaggactggatcaagttcaagactgtgaaaaatttagactgtgttgttacaggcttacaacaaggaaagacctatagattccgtgtaaaagctgaaaatatcataggtcttggtcttcctgatacaactatcccaatagaatgtcaagagaaactagtgcctccatctgtggaattagatgtgaagttaattgaagggcttgtggtgaaggctggtaccacagttagattccctgccatcataagaggtgtacctgttcctactgcaaaatggacaactgatgggactgagattaaaacagatgaccactacacagttgagactgacagcttctcatccgtgctgaccattaagaattgtttaaggaaggatactggggaataccaactcacagtttccaatgcagcgggtaccaaaacagtagctgtccatcttactgttcttgatgtacctggtccaccaacaggtcctattaatatcctggatgtcacacctgaatacatgactatctcatggcaaccgcctaaggatgatggaggaagcccagtgataaattacattgttgagaaacaagatacaaggaaaggtacatggggtgtcgtctctgcaggaagcagtaagctgaagctgaaggtcccacatctccaaaaaggctgtgaatacgttttcagagtcaaagcagagaacaagatgggtgtcggtcctccccttgactccatacctactgttgctaagcacaagttcagtcctccatctcctcctggtaaaccagtggtaactgacattactgagaatgctgcaacggtgtcttggacactgccaaaatctgatggtggcagtccaataactggctattatgtagagcgcagagaaataaccggcaaatgggtgagggtcaacaaaacgcctattgctgacctgaagttcagggtgactggactctatgagggaaatacatacgagtttagagtttttgctgaaaatcttgcaggtttaagcaatccatcacccagttctgacccaatcaaagcttgccggcccatcaaaccaccagggccacctataaatcctaagctgaaagacaagagcaaagaatctgctgacttggtgtggacaaagcccctcagtgatggtggcagccccattttggggtatgtagtagagtatcagaaacctggcacagcgcagtgggataggattaataaagacgaactcatcaggcaatgtgccttccgggtccccggactgattgaaggaaatgagtacagatttcgcattagagcagctaacattgtgggtgagggagagccaagggagcttgcagaatctgtgattgcaaaagacatccttcatcccccggaagtggaacttgacgttacatgccgtgatgtcattaccgtccgggtgggtcaaactatccgcattcttgcccgagtcaaaggcagacctgagccagacataacttggtccaaggaaggaaaagtactggtcaaagacaagcgggttgacctaattcatgatctgcctcgtgttgagctacaaattaaagaagctgtcagagctgaccatggcaagtatatcatctctgctaagaacagcagtgggcatgcccaagggtcagccattgttaatgtccttgacagacctgggccttgccagaatctgaaggttagcaacgtaaccaaggaaaactgcaccatttcttgggaaaacccactagataatggtggctcagaaattacaaatttcatagtggaatatcgtaaaccaaatcagaaaggctggtcaatcgttgcctcagatgtcaccaagagactggtcaaggccaacctgttagccaataatgaatactatttccgtgtttgtgcagagaataaagtaggtgttgggccaaccattgaaacaaagactccaattttggccatcaatcctattgacaggccaggggagcctgaaaaccttcatattgcagataaaggaaagacctttgtctatctaaagtggcgacggcctgattatgatggtggtagcccgaatctatcatatcatgttgagaggagactgaagggctctgcagactgggaaagagtgcacaaaggaagcattaaggaaacccactacatggttgacaagtgtgttgaaaaccagatttatgagttcagagtacaaactaagaatgaaggtggagaaagtgattgggtgaggacagaggaagttgttgtgaaggaagatttacagaagccagtacttgatctaaaattaagtggggtgctaactgtcaaagcaggggacaccattagactcgaggcaggtgtgagaggcaaaccattcccagaggttgcctggaccaaagacaaagatgctacagatttaacaagatcaccaagggtcaagattgataccagtgccgaatcatcgaaattctctcttaccaaagccaagcgaagcgatggcggtaaatacgtaatcaccgcaactaacccagctggcagttttgtggcctatgcgactgtcaatgttttagataaacctggtcctgtaagaaacctgaaaatcactgatgtgtccagtgacaggtgtactatccgctgggatccaccagaagatgatggcggctgtgaaatccaaaattatatcctagaaaaatgtgagagcaagagaatggtatggtctacctattctgctaatgtcttgacacccagtgctacagtgactcgtctcatagaaggaaatgagtatattttcagagttcgtgcagaaaacaaaataggcacagggcctccaacagaaagtaaaccagtcattgcaaaaaccaagtatgacagacctggccgccctgatcctccagaagtcactaaagtaagcaaagaagagatgaccgtggtttggaacgcccctgaatatgatggtgggaagtctatcacaggatactatttagagaaaaaagaaaagcatgcagtccgctgggtccctgttaacaagagtgccatccctgagcgacgcttgaaagtacagaatctcctcccagggcacgagtaccagttccgtgtcaaagcagaaaatgaagttggcattggagaaccaagcttaccatcaagaccagtggtggcaaaagatcccatagaaccacctgggccaccaaccaatttcaaagtggttgatacaaccaaaagttccataactctcgcatggggaaaaccagtctatgatggtggtgcaccgataattggatatgtcgtagagatgagacccaaaatagcagacgcatcacctgacgaaggctggaaaaggtgcaacgctgcagctcaacttattcgcatggaattcacagtcaccagcttggatgagaaccaggagtacgagttcagggtgtgtgcccagaatcaagttggcattgggcgccctgcagagctaaaggaagccatcaaacctaaagaaatcctagagcctccagagattgacttggatgccagcatgagaaaactggtcgtagtgagagctggctgccctattcgactattcgcaatagtgagaggacgacctgcccccaaagtcacatggcgcaaagtgggcattgataatgtggtcagaaaaggacaagtcgatctagttgacactatggccttccttgtcatccccaactctacccgtgatgactctggaaaatactccctgacccttgtgaacccagcaggagaaaaggctgtttttgtgaatgtcaaagtactagatactcctggacctgtggctgatttaaaagtttcagatgtcactaaaacatcatgtcacgtgtcctgggcacctcctgaaaatgatggtggaagccaagtgacacattatattgtggagaaacgtgaggcagaaagaaaaacatggtcaacagttacccctgaagtgaagaaaacaagcttcaatgtaaccaaccttgtccctgggaacgagtatttcttccgagtaactgctgtcaatgaatatggccctggtgtcccgacagacatccccaaacctgtgcttgcatcagatcctctcagtgagccagatcctccaagaaaactggaggtgaccgaaatgacaaagaacagtgctacactggcctggttacctccgttgcgtgatggaggcgctaaaatcgatggctatatcattagttacagagaagaagaccaacctgcagatcgctggacagagtactcagtggtcaaagacctcagccttattgttactggcctaaaggaaggaaagaaatataaatttagagttgcagctagaaatgctgttggagtcagcatgccaagagaggccgaaggcgtctacgaagcaaaagaacagctattgccaccaaagatcctcatgcctgagcaaatcactatcaaagccgggaagaaacttcgagttgaggcgcatgtgtatggaaagcctaaccccatctgcaaatggaagaaaggagacgacgaagttgttacatccagccacctggccatccacaaggcagacggctcctcagttctgatcataaaagacgttactagaaaagacagtggttactatagcctcacggcagagaatagctccgggtcagacactcagaaaatcaaagttacagtcatggatgctcctgggccccctcagcctccatttgacatttctgaaatagatgctgatgcttgctccctgtcttggcacatccctctggaggatggaggcagcaacattaccaattacatagtagagaaatgtgatgtaagccgtggcgattgggtcacagctctagcatcagtcaccaagacttcctgcagggttggaaagctgatcccaggccaggagtatatcttccgggtccgagctgaaaacagatttggcatttcagagcctctcacatctccaaagatgcttgctaagttcccatttgatgttcctagtgagccaaagaatgcacgtgtcactaaagtcaacaaagactgcatatttgtcgcgtgggacagaccagacagtgatggaggaagccccatcactggttacctgattgaacgcaaagaaagaaacagtttgctctgggtgaaagctaatgacactattgtccggtcaactgagtatccttgtgctggcctcgtagaaggtctagaatattcattcagaatctatgctctaaacaaagctgggtccagcccacctagcaaaccaactgagtatgtgactgcaaggatgccggttgatccaccagggaaacctgaagttgttgacgtcaccaagaacagcgcatcgcttatctgggcccggccaaagcatgatggaggcagcagaattatcggctattttgtagaggcttgcaaacttcctggtgataaatgggttcggtgcaataccacacctcaccagattccccaggaagagtacacagctactgggttagaagagaatgctcagtatcagttcagagcgattgccaagactgctgtgaacatcagccagccttccgagccttctgatccagtgaccattcttgcagaaaatgttcctctacggatagaactcagtgttgagatgaagtctttgcttaccgtgaaggctgggactaatgtctgcttggatgctactgtcttcgggaaaccgatgccaacggtttcttggaagaaagacaccacaccaataaaacaagccgaaggcataaagatggcaatgaagcggaacttgtgtaccttggagctgttcagtgtgaaccggaaagactcaggagactataccattactgccgaaaattccagtggttccaaatcagccaccattaagctgaaagtactagataagccaggtcctccagcatctgtgaaaatcaacaagatgtatgcagaccgtgcaatgctgtcctgggaacctcctctcgaggatggaggctcagaaatcaccaactacatcattgacaagcgtgaaacaagcaggcccaactgggcccaggtctctgctactgtgcccatcaccagctgcactgtggagaaacttatagagggccatgaataccagttccgtatctgtgccgaaaacaaatacggagtcggcgatcccatcctcactgagccagcgattgccaaaaacccatatgacccgcctggacgctgtgaccctcctgtcattagcaacatcactaaagatcacatgaccgtcagctggaaagccccagcggatgatggtggctcacctatcaccggatacttggttgaaaagcgggaaactcaggcagtcaactggactaaagtcaacagaaaacctgttatagaaaggacattaaaagcaacgggtctccaggaaggcacggagtatgaattccgagttacggctatcaataaagctggacccggcaaacccagtgatgcatccaaagccgtgtatgctcaagacccactgtatcctcctggcccgccagctttccctaaagtctatgataccacccgtagttctgtgagtctatcatggggcaagccggcctatgatggcggcagccctatcattggttatcttgtggaagtaaagcgagctgattctgatcactgggtgaggtgcaatttgccagagaagctccagaagacccgcttcgaggtgactggcctgatggaaaacaccgagtatcagttccgagtgtatgccgttaacaagattgggtacagcgaccccagcgatgtgccagataaacactgccccaaggacatcctaattccacctgagggagaacttgatgctgaactaaggaaaacacttatcttacgtgctggagttacaatgagactctacgtgccagtaaaaggacggccacctccaaagattacttggtctaaaccgaacgtcaatctaagagaaaggattggcctggatataaagtcgacagactttgacaccttcttgcgctgcgaaaatgtgaacaaatatgatgcaggaaaatatatcttaaccttggagaacagctgcggcaagaaggagtacactattgtggtgaaagtgctggacactcctggtccacctgtcaatgtgactgttaaggaggtatccaaggactctgcatatgttacctgggatcctcccattattgatggtgggagccccatcataaactatgtggttgagaaacgggatgcagagaggaagtcctggtcgacagtgacaaccgagtgctcgaagacaagcttcagagtctctaacttggaggaggggaaatcctacttcttcagagtgtttgccgaaaatgaatacggcatcggggatccgggggagacacgtgatgctgtcaaagcttctgaaaccccgggacctgtggtcgacctgaaagcactggctataactaagtcatcttgtaccatcggctggaagaagcctcgaagtgatggcggaagcagaattactggctatgtggtggatttcctgacagaagaaaataagtggcaacgggtcatgaaatcactgagccttcagtactccacaaaggatctgaaggaggggaaggagtacaccttcagagtgagtgcagagaatgaaaacggagaaggaaccccaagtgaaattgtggttgtggccaaggacgatgttgtggctcccgatcttgacttgaaggatctacctgatctgtgctacttggctaaagaaaacagcaacttccgtctcaagatccccataaaaggcaaaccagcaccatcggtgtcttggaagaagggggaagatcccctagcaacagacacaagagtcagtgtcgaatcaactgcagttaacacaacccttgtagtatatgactgccaaaaatccgatgctggaaaatacacaatcacactcaagaatgttgctggcaccaaggaaggaactctttctataaaggttgttggcaagcctggcatccccaccggaccaatcaaatttgatgaagtcacagcagaagccatgaccttgaagtggggtcctccaaaggatgatggaggttctgaaatcaccaactatgtactagagaagagagactctgtgaataacaagtgggtgacatgtgcttccgctgtccagaaaaccacctttagagtaaccagacttcacgagggcatagaatacaccttcagggtcagtgctgaaaataaatatggtgtaggagaaggcctaaagtcagagccaattgttgccaaacatccatttgatgtgcctgatgctcccccacctcccaatattgtggatgtcagacatgattcagtatctctaacatggactgatcccaaaaagactggtggctcaccaattacagggtatcatattgaattcaaggaaagaaacagccttctgtggaagagagctaacaagactcctataaggatgaaagattttaaagtgacaggattaactgaaggtcttgaatatgaattcagagttatggctatcaatctagctggagtgggcaagccaagcctgccatcagagccagttgtggcacttgatccaattgatcctcctggaaaacctgaggttatcagcgtaacaaggaattcagtgactctcatctggacagaacctaaatacgatggtggccataaattaacaggatatatcgtggagaagcgggatctaccctctaagtcttggatgaaagccaaccatgttaatgtcccagactgtgcctttactgtaactgatcttgttgaaggtggaaaatatgaattccgaatcagagcaaagaatacagcgggtgctattagtgctccatcagagagcacaggaaccattatttgcaaggatgaatacgaggcaccaaccattgtccttgatccaacaattaaagatgggctaacagtcaaggcaggggatagcattgttttaagtgccattagcattctcggcaaaccccttccaaagtcaagctggtccagggcaggaaaagatatcagaccatcagacatagctcaaataacttcaaccccaacatcttctatgctgacagttaagtatgccacaagaaaggatgctggcgagtataccatcaccgctaccaatccttttggcacaaaggaggaacatgtgaaggtatcagtccttgatgtacctggtcccccaggtcccattgaaatcagtaatgtttcagctgaaaaagcaacacttacttggacacctcccttagaagatgggggctcaccgattaaagcttatgttcttgagaagagagaaaccagccggcttttgtggacagtggtttctgaagatattcaggcatgcagacatgtggtaaccaaactcatccaaggaaatgaatacctcttccgtgtgtcagcagtaaaccattacggcaaaggagaacccgttcagtctgagcctgtcaaaatggtggacagatttggtcctcctggccctcctggaaaacccgagatctcaaatgtcaccaagaacactgccactgtcagctggaagaggccaactgatgatggtggcagcgagatcacaggatatcatgtagaaaggagagaaaagaaaggcctgcggtgggtgagagcaaccaaaacaccagtttccgatctcaggtgcaaagtaactggactgcaagaaggaaatacctatgagttccgtgtcagtgcagaaaacagagccgggattggtcctcccagtgacgcctcgaatcctgttctgatgaaagatgttgcatatcccccaggaccaccttcaaatgcacatgtcactgataccaccaagaaatcggcttctttagcatggggcaagcctcattatgatggtgggcttgaaatcactggctatgtggtagagcatcaaaaagtaggagatgatgcctggatcaaagacacaacaggaacagccctcagaatcactcagtttgtggttcctgatcttcagactaaggaaaaatacaattttagaattagtgccatcaacgatgcaggtgtgggggaaccagctgtgattccaaatgttgaaattgtagagaaggaagtggctcctgattttgagctagatgctgagctgcgaagaacacttgtggttagggcagggctcagtattaggatttttgtgccaattaaaggtcgtcctgcacctgaagtgacatggaccaaagataatatcaacctgaagcaccgagccaacatcgaaaacacagagtcatttactcttctcattattccagaatgtaacagatatgacactggtaaatttgtgatgaccatcgaaaacccagctgggaagaaaagcggcttcgttaacgtcagagtcctagacacaccaggccctgtccttaacctaaggcctacagacatcacaaaggacagtgtcaccctacactgggacctacctctgatagatgggggctcacgtataacaaattatattgtggagaaacgtgaagcaaccaggaaatcctactccacagtcactactaagtgccataaatgtacatataaagtgactggcttgacagaaggctgtgaatatttcttcagagtgatggcagaaaatgaatatggggttggtgagccaacggaaaccacagaacctgtgagagcctctgaggcaccgttacccccagatagccttaacattatggacattaccaagaacacagtcagcctggcgtggcctaagccaaggcatgatggtgggagcaagatcactggctatgtgattgaagcccagagaaaagggtctgaccagtggacccacatctcaacagtgaaagggttagaatgtgtggtgaggaacctaaccgaaggagaggaatataccttccaagtgatggcggtaaacagtgcaggcaggagtgcccctagagagagcagacctgtcattgtcaaagagcagacgatgctcccagagctggatctccgtggcatctatcagaagctagtcattgccagagctggtgacaacatcaaagttgaaatcccagtacttggtcgacccaagcccacagtcacatggaaaaagggagaccaaatccttaaacagacacagagagttaatgttgaaaacacagcaacgtcaaccatcttaaatatcaatgagtgtgtcagaagtgacagtggaccctatccattaacagcaaagaacactgtaggagaggttggtgacgttataaccattcaagtccatgatattccaggaccacctactggacccattaaatttgatgaagtttcatctgactttgtaaccttctcttgggagccaccagagaatgatggaggtgtaccaataagcaactatgtagtagagatgagacagacagacagtactacatgggtggagttagcaacaactgttatacgtactacctataaagcaactcgtctgaccacaggagtggagtatcaattccgtgtaagggctcaaaacagatatggagttggaccgggcatcacatctgcatctgtagttgcaaactatccattcaaggtgcccgggcctcccggtacccctcaggttactgcagtcaccaaagactccatgacaatcagctggcatgaaccactttctgatggtggaagccccattttaggatatcacattgaaaggaaagaacggaatggcatcctctggcagactgtgagcaaagcattagtaccaggcaacattttcaaatcaactggacttaccgatggcattgcttatgaattccgagtaattgcagaaaacatggcaggcaagagcaagccaagcaagccatctgaaccaatgtttgctttggatcccattgacccacccgggaaaccagttcctctaaacattacaagacacacagtggcactgaagtgggctaagcctgaatataccggaggctttaaaattactagctatgtggttgaaaagagggaccttcctaatggacgatggctgaaggccaacttcagcaacattttagagaatgaatttacggtcagcggcctaactgaagatgctgcatacgagttccgtgtgattgccaaaaatgctgccggtgccatcagtccaccgtctgagccatcagatgccatcacatgcagggacgacctggaggcaccaagaataatggtggatgttagatttaaggataccatcacattaaaagctggcgaagcattcaagttggaagctgatgtttcaggtcgcccacctccaacaatggaatggactaaagatggaaaggagcttgaaggcacagggaaattagaaataaaaattgcagacttctccactcatctgataaacaaggattcctcaagaacggatagtggggcttacatcctgacagcaaccaatcctggtggctttgccaaacacattttcaatgtcaaagttcttgatagaccgggaccacctgagggacctttggctgtgtctgatgtgacatcagagaagtgtgtgttgtcatggttgcctccactggacgatggaggtgccaaaattgatcattacatcgtacagaaacgtgaaaccagcaggttggcatggacaaatgttgccacagaagtccaagtaacaaagctgaaggttactaagctcctgaaagggaatgaatacatattccgtgtcatggcagtaaataaatacggggttggagagccacttgaatcagaacctgtgcttgcagtggatccatatggaccacctgacccacccaagaacccggaagttacaactatcaccaaggactccatggtcgtctgctgggggcatcctgactctgatggtggaagtgaaattatcaactacattgtggagcggcgtgataaagctggccagcgctgggtaaaatgcaacaaaaaagctctgactgacttaagatttaaagtatctgggctgacagaaggacatgaatacgagttcagaattatggcagaaaacgcagctggaatcagtgctccgagtgctaccagcccgttttataaagcttgcgacactgtgtttaaacctggcccaccgggtaacccacgtgtccttgatacaagcaggtcgtccatttcaattgcgtggaataaacccatttatgatggaggttcagaaatcactgggtatatggttgagattgccctgcctgaagaagatgaatggcaggttgtcactccaccagctgggctcaaggcaacttcctataccatcaccagcctcatagagaatcaggaatataaaatccgcatttatgccatgaattctgagggacttggggaacctgcccttgttcccggaactccaaaggcagaagaaagaatgttgcctccagagatagaactggatgctgacttacgcaaagttgtcactatacgagcctgctgcaccttgaggctctttgttcccatcaaagggagaccagcacctgaggtcaagtgggcccgagagcatggagaatctctggacaaggctagcattgaatccacaagctcttacaccctgcttgttgttggaaatgttaacagattcgacagtggcaagtacatactaacggtagaaaacagctctggcagcaagtcggcgtttgtcaatgttagagtgctagatacgccaggccctccacagaatctaaagataaaggaggtcacaaagacatctgtcacattgacgtgggagcctcctctcctggatggaggctcaaaaataaagaactatattgttgagaagcgagagtccacaagaaaggcatattcaaccgtggcaacgaattgccataagacgtcctggaaggtagaccagctgcaagaaggctgcagttactatttccgtgtcctcgctgaaaacgaatatggcattggactgcccgccgaaacagctgagtctgtgaaggcatcggagcgacctcttcctccagggaagataactttgacggatgtcacacgaaacagtgtgtctctctcttgggagaagccagaacatgacgggggcagccgaattctaggctacattgtagagatgcagagcaaaggccaggtgaggaatactctttccgtgtttgcagcgcagaatgaaaagggcatcagtgaccccagacaaactgagtgtgccaccttcaaactcctctttacaataccattcacggtactggcaggtgaagacctgaaaattgatgtaccattcattggacgccctccaccagctgtcacctggcataaagatgacatacctctgaagcaaacaactagagtgaatgcagagagcacggaaaacaattctctactgacaataaaggaagcctgccgagaagatgttggacattacacggttaaactgactaactcggcaggtgaagccactgaaacccttaatgttatcgttcttgacaagccagggcccccaacaggaccagtgaagatggatgaagtgacagcagacagtgtcactctttcctgggaaccaccaaagtatgatggcggaagctctatcaataattacattgtagagaaacgagacacatccacaaccgcctggcaaatcgtgtcagctacggttgcaagaacaaccataaaggcctgcagactaaagactggctgtgagtatcagttcagaattgcagcagaaaacagatatgggaagagtacctacctcaactcagagcctgttgttgcccagtacccattcaaagtgccagggccaccgggcacaccattcgtcacgcttgcctccaaagacagcatggaggtacaatggcatgagccagtcagtgatggtgggagcaaagtcattggctaccatctagagcgcaaggaaagaaatagcatcctctgggtcaagctgaataagacacctattcctcaaaccaagttcaagacaactggccttgaagaaggcattgaatatgaatttagagtgtctgcagagaacatcgtaggcatcggcaagccaagtaagccatcagaatgttatgctgctcatgacccatgcgatccaccaggtcggccagaggcaatcattgtcacaaggaactctgtgactcttcagtggaagaaacccacctacgatggtggaagcaagatcactggttacattgttgagaagaaagaattgcctgatggccgctggatgaaagccagttttacaaatatcattgacacccagtttgaggtaactggcctactggaagatcatagatatgagtttcgagttatagctcgaaatgctgcaggagttttcagtgagccctcagaaagtacaggggcaatcacagcaagagatgaggttgagccacccagaataagcatggaccccaaatacagggacacggttgtggttcaagctggtgagtcattcaagatcgatgcagatatatatggcaaaccaataccgaccactcagtgggtaaagggtgaccaggagctttcaagcacagctcggttagaaattaagagcaccgactttgccaccagtctcagtgtcaaagatgcggtacgtgtggatagtggcaattatatcctaaaggccaaaaacgttgcaggggagaaatcagttactatcaatgtcaaagttctcgatagaccagggccacctgagggacctgttgctatatcaggggttacagcagaaaaatgtactctagcttggaaacccccacttcaggatggtgggagtgacatcacaaattacattgtggaaaggcgagaaaccagccgcctcgtctggactctggttgatgccaatgtgcaaacgctcagctgtaaagtcctgaagcttcttgagggcaatgaatatattttccgtataatggctgtgaacaaatacggtgttggtgaacctcttgaatctgagtcattgattgccaagaatccatttgtagtcccagatgcacccaaagctccagaagttacagctgtgaccaaagactcaatgattgttgtatgggaaaggccagcgtctgatggtggcagtgagattctaggatatgttctagaaaaacgggacaaagaaggcataagatggacaagatgccacaagcgtctaattggagagctgcgcctgagagtgactggactgttagaaaatcacaattatgaattcagagtctccgctgaaaatgctgctggacttagtgaaccaagccccccttctgcttaccagaaggcatgtgaccccatttataagccaggccctccaaacaaccccaaagtcatggatgttaccagatcttcggttttcctttcttggaccaaacctatctatgatggtggctgtgaaatccaaggatacatcgtagaaaaatgtgatgtgagtgttggtgaatggacaatgtgtacgccaccaactggaatcaataagacaaatctagaagtcgagaagttgttggaaaagcatgaatacaacttccggatctgtgccattaataaggccggagtaggggagcatgctgatgtccctgggcctgtaatggttgaagaaaaacttgaagcacctgatatagaccttgaccttgaactaaggaaagtgattaatataagggcaggtggttccttaaggctgtttgttcctataaaaggccgtcctacaccagaagtcaagtgggggaaggttgatggtgatatccgggacgcagctataattgatgtcactagcagcttcacctctcttgttcttgacaatgtcaatcgatatgatagtggaaaatacactctcacactagaaaacagcagtggaacaaaatctgcctttgtgacggtaagggtcctggacacaccaagcccacctgtcaacttaaaagtcacagaaatcaccaaggactcggtatcaattacatgggaacctcctttgttggacggaggatcaaaaattaaaaattacattgttgagaaacgagaagccacaagaaaatcctatgctgcagttgtaacaaactgccataagaattcgtggaaaatcgatcagctccaagaaggttgcagttactacttcagggttaccgctgagaacgaatacggtattggcttgcctgcccgcactgcagatccaatcaaggttgcagaagtcccacaacctccagggaaaataactgtggatgatgtcaccagaaacagtgtctctctcagttggacaaagcccgaacatgacggtggcagtaaaatcatccagtatatcgtagaaatgcaagctaaaaacactgataagtggtcagagtgtgctagggtgaagtcccttgacgcagttattaccaacctaactcagggagaagaataccttttcagagtcattgctgtaaatgaaaaaggaagaagcgaccccaggtcccttgcggttccaatcatcgccaaagatctggtcatcgagccagacgtgagaccagcattcagcagttacagtgtacaggttggccaagacttgaaaatagaagtgccaatttctggacgtcctaaaccaagcatttcctggactaaggatgggatgccattgaagcagaccacaagaatcaatgttaccgactccctggacctcaccacactcagcattaaagaaactcataaggatgatggtggacagtatggaatcacagtttccaatgtggtgggtcagaaaacagcagctattgaaatcataactctagataaacctgatcctccaaaagggcctgttaaatttgatgagatcagtgctgagagcatcacattatcctggaaccctcccttatatacagggggctgtcaaattaccaactacattgttcagaaaagagacacaaccaccacagtatgggatgtcgtctctgctactgttgccagaacgaccctcaaagtaaccaagctgaaaacgggtacagaataccaattcagaatatttgctgaaaaccgatacggacaaagctttgctctggagtctgagccagttgtagctcaatatccctacaaagaaccaggccctccaggaacgccatttgtcacagccatctccaaagagtctatggtggtacagtggcatgaaccgatcaataatggtggaagcccagtcataggttaccaccttgagagaaaggaaaggaatagtattttgtggacaaaagtcaacaaaaccattattcatgacacccagtttaaagcactgaaccttgaagaaggcattgagtatgaatttagagtttatgctgaaaatattgttggggtaggcaaggcaagcaagaattctgaatgctatgtagccagagacccctgtgacccaccaggtaccccagaagcaataatagttaagagaaatgaaatcactttacagtggaccaagcctgtgtacgatggtggcagtatgatcacaggttacatcgtagagaaacgtgatttacccgagggtcgctggatgaaagccagtttcacaaatgtcattgaaactcaattcaccgtgtcaggtcttactgaagatcaaagatatgaattcagagtcattgcaaagaatgcagctggggcaataagtaaaccctctgacagtactggaccaataactgccaaggatgaggttgaactcccacgaatttcaatggatccaaaattcagagacacaatagtggtaaatgctggagaaacattcaggcttgaggccgatgtccatggaaaacccctacccaccattgagtggttaagaggagacaaggaaattgaagaatctgccaggtgtgaaataaagaacacagatttcaaagctttacttattgtaaaagatgccattcgaattgatggtggacagtatattttaagagcctcgaatgttgccgggtctaagtcatttccagtaaatgtgaaagtgctagacagaccaggaccaccagaagggccagttcaggttactggagtcacagctgaaaagtgcactttggcatggtctccaccacttcaagatggtggcagtgacatttctcactacgtggtagaaaagcgagaaaccagtcgacttgcatggactgtggttgcttcagaagttgtgactaattctctgaaagttaccaagctcttagaagggaataaatatattttccgaataatggctgtcaacaagtacggtgtcggggaacctttggaatctgctccagtactcatgaaaaatccatttgtgcttcctggaccaccaaagagcttagaagtcacaaacattgccaaagactccatgacagtctgctggaatcggccagacagtgatggtggcagtgagatcattggttacattgtggagaagagagacagaagtggcattcggtggatcaagtgtaacaaacgccgcattacagatttgcgactcagggtgacaggattaacagaagaccatgagtatgaattcagagtctctgcagaaaatgctgctggagttggagaaccaagtcctgctaccgtttactataaggcatgtgatcctgtgttcaaacctggcccacccaccaatgcacacgttgtagacaccactaaaaattcaattacacttgcctggagcaaacctatctatgatggcggcagtgagatcctgggctacgttgtagaaatctgtaaagctgatgaagaagaatggcaaatagttactccacagactggcctgagagtcactcgatttgaaattgccaaactaatcgaacaccaagaatataaaatacgagtttgcgccctcaacaaagttggtttaggtgaggctgcctcagttcctggtacggtgaaaccggaagataaactcgaggcacctgaacttgaccttgactctgagttaaggaaagggatcgttgtcagagctggtggatctgccagaatccatattccattcaagggtcgtccaacgcctgagatcacttggtcaaaagaggaaggtgaattcacagataaggtccaaattgagaagggaattaacttcacccaactctcaatagataactgtgacagaaacgacgccgggaaatacatcctcaagttggagaacagcagcggatcaaagtcggctttcgtaaccgtgaaagtacttgacacaccaggaccgccacagaatctggctgtcaaggaagtgagaaaagactctgtccttctggtatgggagccacctatcattgacggtggggcaaaggtcaagaactatgtcatcgacaagcgcgagtccactcgaaaagcatatgctaacgtgagtagtaaatgcaataaaacgagcttcagagtcgagaacctgaccgaaggagccatctactactttagagtcatggcagagaatgaatttggggttggtgttcccacggagacatctgatgctgtgaaagcttctgagcctccttccccaccaggaaaggtcacactcactgacgtgtcccagaccagtgcatcccttatgtgggagaaacccgagcatgatggagggagcagaattctgggctatgttgttgaaatgcagcccaaaggaacagaaaagtggagcgttgtggctgaatccaaagtctgtaatgcagtggttagtggcctgagctccgggcaagaatatcagttccgtgtcaaagcttacaatgagaaaggaaaaagtgacccgagagtgcttggcattcctgtcatagccaaggacttgaccatccagcctagttttaagctgccatttaatacatatagtgtccaagcgggagaggatctgaaaatagaaattccagtcataggcagaccaagacctaaaatttcttgggtcaaagatggtgagcctcttaaacagaccaccagagtaaatgttgaagaaacggctacttcgactattttacacattaaagaaagcagcaaagatgacttcgggaaatacagtgtcacagcaacaaacagtgcaggcacagcaacagaaaacctcagtgttattgttttagaaaagcctggtcctcccgttggaccagtgaagtttgatgaagttagtgcagactttgtggtcatatcttgggaacctcccgcctatactggtgggtgccaaatcagcaactacattgtagagaagcgagatactaccactaccaactggcagatggtgtcagcaacagttgccaggacaaccattaaaataagcaaactgaaaacaggcaccgaataccagtttaggatttttgctgagaacaggtatgggaaaagcactcccctggattctaagcccgttgttgtacaatatccatttaaagagcctggaccacctggaaccccttttgtaacatctatctccaaagatcaaatgcttgtgcagtggcatgagccagttaatgatggaggcagcaaagtgactggctaccatcttgaacagaaggaaaagaatagcatcctgtgggtcaagttgaataagatccccatccaagacaccaaattcaaaacaacggggcttgatgaagggcttgaatatgagttcagggtttctgccgagaacattgtgggcattggcaagcctagcaaagtgtcagagtgctatgttgcgcgtgatccgtgtgacccacctggtcgacctgaagccatcgtcattacaagaaacagcgtcacgctgaaatggaagaaacctgtttatgatggtggcagcaagataacgggttacatcgtagaaaagaaagaccttcctgacggccggtggatgaaagccagcttcaccaatgttgtggaaactgagtttacagtgactgggcttgtagaagaccaaagatatgaatttagagtcattgcaagaaatgcggctgacaactttagtgagccatctgaaagcagtggcgccatcactgcaagggatgaaatcgatgcaccaaatgcctcgctggatcctaaatacagagatgtcatcattgttcatgcaggagagacctttgttctcgaagctgatatccgtggcaaacccatacctgacatcatatggtcaaaagatgggaacgaactcgaagaaacagcagctaggatggaaattaaatctactctgcagaaaacgactctcattgtcaaggactgtatacgcaccgatgggggacagtataccttgaaactcagcaatgtcgggggcaccaagactatacctattaccgtgaaggtgctggataggccagggcctcccgaaggacctctgaaagttactggagttacagccgaaaagtgttacctggcatggaacccacctttgcaagatggtggtgctagtatttcacattacatcattgaaaagagagagacaagcagactctcctggacccaggtttcaaatgaagtacaggccctcaactacaaagtcacgaagttgcttcctgggaacgagtatattttccgggttatggcagtgaataaatatggaattggagaggccctggagtctgaaccggtgatagcctgtaacccatacaagcgtccaggtcctccttcaacacccgaggcctcagccatcaccaaagactctatggtactaacatggacacgtccagtggatgacggaggtgctgaaattgaggggtacattcttgaaaagcgagataaggaaggcatcagatggaccaagtgcaacaagaaaacattaacagaccttcggttcagggtgacaggcctcacagaaggccactcctatgaattcagagttgctgctgagaacgcagctggtgtcggggaacccagtgagccgtccgttttctaccgtgcatgtgatgccttgtatccaccaggtccaccaagcaaccccaaagtgacagacacctccaggtcttctgtctccctagcatggaataagccaatttatgatggtggtgcacccgttagaggatatgtgattgagctcaaaaaagctgcggctgacgaatggactacctgtacgccaccatcgggattacaagggaagcagttcacagtgaccaagcttaaggagaatacagagtacaacttccgcatctgtgctttcaatactgaaggtgtaggtgagcctgcaacgataccaggctccgttgttgctcaggagaggatggaagcaccagaaatagaactggatgctgatctcagaaaggtggtcactctgcgtgcaagtgccactttgcgcctatttgtcactatcaaaggccgcccagaacctgaagttaagtgggaaaaggctgaaggcattctcacggaaagagcccagatcgaggtgacgagttcttatacaatgctggtgattgacaacgtgaccagatttgacagtggtagatacaacctcaccctagaaaacaacagtggctccaaaacggcttttgtcaatgtcagagttcttgactcaccaagcgcacccgtgaatctgaccataagagaagtgaagaaagactcggtgacgctgtcctgggagccaccacttattgacggtggagcaaagattacaaattatatcgttgaaaaacgagaaactacaagaaaagcttacgctaccattacaaacaactgcactaagaatactttcaaaatcgaaaatctacaagaagggtgttcttattacttccgagtcctggcttctaatgaatatgggattggtttgccagccgaaacagcagagcctgtcaaagtgtccgaaccaccactcccacctggaagggtaacccttgtagatgtgacccgtaatacagctacgattaagtgggagaagccagagagcgatggcggcagcaagatcactggttatgttgtggaaatgcagacaaagggcagtgaaaagtggagcgcatgcacacaagtgaagactttggagacaactatatctggcctaactgcaggggaagagtatgtcttcagggtagctgcagttaatgaaaaaggaagaagcgacccaagacagcttggggtgccagtcattgcaaaagacattgaaataaagccctccgttgagcttccttttaatactttcaacgttaaggctaatgaccaactcaaaattgacataccatttaaaggaagacctcaagctaccgtggcctggaaaaaagatggtcaggtccttagagagacaactagagtcaacgtagcttcctcaaagaccgtaacaaccctatctattaaagaagcctcaagggaagatgttggaacttacgaactatgtgtttcaaatactgctggatccataacagttcctattactgtcattgtccttgacaggccaggacctccaggacccatacgaattgatgaagttagttgtgacaatgtgtctatttcttggaatcctccagagtatgatggtggctgccaaattagcaactacattgttgaaaagagagaaaccacttctacaacgtggcaggtagtttcacaagcagtggcaagaacatccattaagatagtccgtctgacaacaggaagtgagtatcagttccgtgtctgtgcagagaatcggtatggaaagagttcctacagtgagtcctcagccgttgtcgctgagtatccattcagccctcctgggcctcctggtactcctaaagttgtgcatgccacaaaatctaccatggttgtaagctggcaagtaccagttaatgacggagggagccaagtgattggctatcaccttgaatacaaagaaagaagcagcattctctggtcaaaagcaaacaaagtcctcattgcagatactcagatgaaggtctctggtctggatgaggggctgatgtacgagtatcgtgtatatgctgagaatatcgctggaattggtaaatgcagtaaagcctgtgaaccggtccctgcaagagacccttgtgaccctcctggacaacctgaagtcaccaatatcacaagaaaatcagtgtcacttaagtggtctaaaccacgttatgatggtggagcgaagatcaccggatacattgttgaacgcagagagctaccggacggcaggtggctgaagtgcaatttcaccaacgttcaggaaacatactttgaagtaactgagctaactgaagaccagcgttatgaattccgggtttttgcaagaaatgctgctgattcagtcagtgagccatctgaatccactggacctatcacggtgaaagacgacgttgaggcgccaagaattatgatggatgtcaaattccgagatgtcatcattgtcaaggccggagaagtccttaagataaatgcagacattgcagggcgacctctgccggtaatttcctgggccaaagatggggtagaaattgaagaaagggcaaaaacagaaattgtctcaacagactatactaccacattaacagttaaagactgtgtaagaagagacactgggcagtatgtccttacactgaagaatgtggcaggaactcggactatggcagttaactgtaaagtacttgataagcctggcccgccagcagggccacttgaaataaatggcctcactgctgagaagtgctccctttcctggggacgtccccaggaagatggcggtgcagatattgattattatatcgtagaaaaacgtgaaacaagccgccttgcatggaccatatgtgaagcagagttaaggacaacatcttgtaaagtgaccaagctactcaaaggcaacgaatatatcttcagagtaactggtgttaataaatatggtgttggtgagcccttggagagcatggccgtgaaggcgctagatccattcaccactcctagcccacccacatctttggaaattacatctgtgaccaaagattccatgacactttgctggtcaagacctgagactgatggaggcagtgacatctctggatacataatcgaaaggcgtgagaaaaacagtctacggtggatgcgtgtgaacaagaagccagtgtatgatctgagagtgaagtccacaggactccgagaaggatgtgaatatgagtatcgggtttttgctgaaaatgctgccggcctgagtcttccaagtgaaacttctcccttggttcgagcagaagaccctgtgttcttgccatctcctccatctaaacccaaaatagtggactcgggcaagacaacaatcaccattggctgggttaaacctttgtttgacggtggggctccaataacgggatataccgtagaatacaaaaagtctgaggaaaccgactggaaagttgccattcagagcttcagaggcacagaatacacaatgagtgggctaacaacaggagacgagtatgtttttagagtgaggtcactcaataagatgggtgccagtgaccccagtgatagctccgatccccaggtagccaaagagagagaagaagaacctgtatttgacgttgacagtgagatgaggaagaccttgattgtcaaggctgggtcctcgtttaccatgacagttcctttcagaggaagaccaatccccaacgtctcctggagtaagcccgacaccgacctccgcacgagagcgtacatcgactccacagattctcgtacattacttactattgagaatgccaacagaaatgattctggaaaatacacgctgacaattcagaatgtgctgagcgctgcttccatgaccttcgtcgtcaaagtcttagattccccggggcctccagccaatattactgtacgtgaagtaaccaaggaaactgctatgctgtcctgggatgttcctgaaaatgatggcggagcaccggtgaagaattaccacatagaaaaacgtgaggccagcaagaaggcgtgggtgtcggtcactaacaactgcaaccgcctctcttacaaagtgaccaacttacaggaaggagctatctactacttccgagtctctggggagaacgagtttggtgttggtgtgccagctgagacaaaggaaggagtcaaaataacagaaaaaccaagcccaccagaaaagcttggtgtaacaagtgtatccaaagacagtgtctcattgagctggctgaagccagaacacgacggtggtagcagaatcatacactatgtcgtcgaagcacttgaaaaaggacagaaaacgtgggttaagtgcgctgtggtgaagacaacccaccacgttgtttccggtctgagagagagtcatgagtacttcttccgggtctttgcagaaaaccaagctggtctgagtgaccccagggagctcctgcttcctgtcctcatcaaggaccagctagaaccacccgaaattgatatgaagaatttcccaagtcacactgtgtatgtaagagctggttccaaccttaaagttgacattccaatttctggaaaaccattacccaaagtgaccttatcaagagatggtgtaccactgaaggccaccatgagatttaatactgagattaccgctgagaacctgaccatcaatctcaaagaaagtgttaccactgacgctggaagatatgagatcactgctgccaactccagtggaaccaccaaaactttcattaacatcattgtgctggacaggcctggaccccctactggccctgtagccattagtgatataactgaagaaagtgtgactctcaaatgggagccaccaaagtatgatggcggaagccacgtcaccaattacattgtcctgaagagagaaacaagtactgcagtgtggtctgaagtgtcagcaacagtagcaagaaccatgattaaagtcatgaaactaaccacaggagaagaataccaattccgcatcaaggcagaaaatcgcttcggcatcagtgatcatatagattcagtgtgtgtggttgtcaaactaccatacactacacctggaccaccatctacaccctgggtatctaacgttactcgagaaagcatcactgtgggttggcacgaaccagtgtccaatggaggtagtgcagtcacgggctaccacctggaaatgaaagacagaaatagtattttgtggcagaaagccaacaaaatgatcatccgtacaactcacttcaaagttacaacaatcagcgctggacttatttatgaattcagggtgtatgcagagaatgctgctggtatcggaaagcccagtcacccatctgaaccagtcttggccattgatgcctgcgaacccccaagaaatgtgcggatcactgatatctcaaagaactctgtcaacctttcatggcaacaaccagcttttgatggaggaagcaagattacaggctacattgttgagaggcgcgaccttccagatgggagatggaccaaggctagcttcaccaatgttattgagactcaattcactgtctctggattgactcagaattcccagtatgaattccgggtctttgctagaaatgctgttggttctgtcagcaacccatctgaggttgtaggccccatcacatgcattgactcttatggtgggcctgtgattgacttgcctctagaatatacagaagttgtcaaatatagagcaggtacctccgtgaagctcagagctggtatttccggcaaacccgagcctacgattgagtggtacaaagatgataaagaattacaaaccaatgcattggtgtgtgtggaaaatagcactgaccttgcatctatactcatcaaagatgccaaccgccttaacagtggaagctatgagttgaaactgaggaatgccatgggttccgcctcagccaccatcagagtacagatccttgacaaaccaggacctccaggcggaccaattgaatttaagactgtcactgcagaaaagataactctgctctggaggcccccagctgacgacggtggcgcaaagatcacgcactacatcgtggaaaaacgggagacaagccgagtcgtgtggtctatggtggctgaaaatctggaagagtgcatcgttacaactaccaaaattatcaaagggaatgagtacgtcttccgagtccgagctgtgaataagtatggaattggcgagccgctagaatctgagccagttgtagccaagaatgcctttgttacacctgggcctccaagcatcccagaggtgacaaagattaccaagaattcaatgactgttgtctgggacaggccaactgtagatggtggcagtgaaataaatggctatttccttgaaagacgagacaagaagagtctagcgtggcttaaagtattaaaggagactattcgtgacaccagacaaaaggtgacaggactcacggaaaacagtgactatcagtatcgagtctgtgctgtaaatgctgctggagtgggtccattctcagaaccatccgacttctacaaggctgctgatccaattgatcctccaggaccacctgccaagataagaattgcagactcgaccaaatcatccatcacccttggctggagtaagcctgtctatgatggtggcagtgatgttactggatatgtggttgagatgaaacaaggagatgaagaagaatggaccattgtctctaccaggggagaggtcagaactacagaatatgtggtctctaacctgaaacccggagtcaattattatttccaagtatcagcagtaaactgtgccggccaaggagaacctataacaatgactgaacctgcacaggctaaagatgtccttgaggaaccagaaatcgacctagatgtggctctcagaacatctgttatagctaaagctggtgaagatgtccaactactgattccctttaaaggcagaccgccacctactgtcacctggaggaaagatgagaagaatcttggcagcgataccagatacagcatccaaaacactgattcgtcttctttgcttgttattcctcaagtcactcgcaatgatacaggaaaatacatcctgacaatagaaaacggagtaggccaaccaaagtcttccaccgtgagtgttaaggtgctcgacacaccagctgcctgccagaagttacaggtgaaacatgtttccctaggcacagtcacattgctctgggatcctcctctcatcgatggagggtctcccatcattaactatgtcatcgaaaagagagatgccacgaagagaacatggtctgttgtgtcacacaagtgttccggcacatcctttaaagtaacagatttatcagagaagactccattcttcttcagggttcttgcagaaaatgaaattggcattggtgagccttgcgagaccacggagcccgtgaaggctgctgaggtgccagcacctatccgagatctctcaatgaaagattccacaaagacatctgttgtcctgagctggaccaagcctgactttgatggtgggagcatcatcacagactatctggtggaacggaaaggcaaaggtgaacaagcatggtcccatgctggcatcagtaagacatgtgagattgagattggacaacttaaagagcaatcagtcttggaattccgagtgtctgctagaaatgagaaaggacagagcgaccctgtcactattgggccacttacagtgaaggagcttgtaattacacctgaagttgacttgtcagaaatccctggggcacaaatatctgtgagaattggacataacgtacaccttgaattaccttataaaggaaaacccaagccatccatcagttggctgaaagatggcttgccactgaaggaaagtgaatatgttcgtttcagtaagacagaaaacaaaatcaccttgagtattaagaattcgaagaaagagcatggagggaaatatactgttattcttgataatgcagtgtgtagaaactcattccccattacaatcatcaccctcggcccaccgtcaaagcccaaaggacccattagatttgatgaaatcaaggctgacagcgccatcatgtcatgggacatacctgaagatgacggaggaggagaaatcacctgttacagcattgagaagcgggaagcatcacaaacaaattggaagatggtgtgttcaagtgttgccagaacaactttcaaagtttccaatctggtcaaagattctgaataccagtttagagttagagcagaaaatagatatggagtcagtgagccacttgcctcaaatatcatcgtggcaaaacaccaattcaggattcctggtcctccaggaaagccagtcatctacaatgtaacttcggatggcatgtcactaacttgggatgcaccagtttatgatggtggttcagaagttactggattccatgttgaaaagaaagaaagaaacagcattctttggcaaagggttaacacatcaccaatatctgggagagaatacagagctactggcttaatagaagggctggactatcaattccgtgtatatgctgagaattctgctggcctgagctcacctagtgacccaagcaagtttacattagctgtttccccagtagacccacccggcactcctgactacattgatgtcacccgggaaaccatcacacttaaatggaacccaccattacgtgatgggggcagtaagatcgtggcctacagcattgagaagcggcaaggaagtgaccgctgggtgagatgcaacttcactgacgtcagtgagtgtcagtacacagttacgggactcagtcctggagatcgatatgagttcagaataattgcaagaaatgctgttggcactataagccccccctcacagtcttctggcctcattatgacaagagatgaaaacgttccaccaacagtagaatttggccctgagtacttcgatggtcttgttattaagtctggagacagtcttaggatcaaagctttggttcaaggacgaccggtcccacgagtaacttggttcaaagatggagttgaaattgagaggagaatgaacatggaaataactgatgttcttggctctaccagcctctttgtcagagacgcaactcgagatcaccgtggtgtttacaccgtggaagccaaaaatgtatctggttccacaaaagcagaagttacagtgaaagtacaagatacaccaggaaaagtagtcgggccaataagatttactaatattactggtgaaaagatgaccctgtggtgggaggcacctctcaatgacggctgcgctcctgtcacgcactacatcattgaaaagcgtgaaaccagcagacttgcttgggcattgattgaggataattgcgaagccctaagttacactgccattaaactaatcactggcaatgagtatcagttccggatttctgcagttaacaagtttggtgttggcaggccacttgagtccgaccccgtggttgctcaaatacaatacaccattccagatgctcccggagttccagaacctagcaatgtcacaggcaacagcattaccctgacttggacgaggccagaatcagatggtggcagtgagattcaacactacatccttgaaaggagagaaaagaaaagcacaagatgggtaaaagtgatcagcaaacgaccaatctctgagacaaggttcaaagtcacaggtctggtggaaggcaacgagtatgagttccatgtcatggctgaaaacgctgcgggcataggaccagcaagtgggatctcaagactcattaaatgcagagagcctgttaacccaccaagtgccccctcggtagtcaaagtgacagacacatcaaagacaactgtgagcttggaatgggccaggccagtctttgacggcgggatggagataattggatacataatagaaatgtgcaaagctgacttaggggactggcacaaagtaaacacagagccatgtgtgaaaacaagatacacggtcactgatctacaggctggtgaagaatacaaattccgggtcagtgcggtcaatggtgctgggaaaggagacagctgtgaggtgaccggcacaataaaagcagtcgatcggttatcagctcccgagttagacattgatgcaaacttcaagcagactcacattgttagagcgggagttagcattcgtctcttcattgcctaccagggtagacccactcctacagcagtatggagcaagcctgactctaaccttagcatccgggctgatatccacacaacagactccttcagcaccctcaccgtggaaaactgcaacagaaatgatgcagggaaatacacactcacggtagaaaacaacagcggtaagaagtcgataacattcactgtaaaggtgctggactctccaggaccacctggtcccattaccttcaaagatgtgacccggggatctgctacactgatgtgggacgcccctctccttgatggtggtgcccggatccatcactatgtgatagagaagcgggaagcgagtcgccgtagctggcaggttgtcagtgaaaaatgcactcgccagatcctcaaggtgagtgagctgacagaaggtgttccgtactatttccgtgtttctgctgaaaatgagtacggtgttggtgaaccctatgaaatgccagaaccaattgtagccacagaacagcccgctccacctaggaggcttgatgtcgttgacactagcaaatcctctgcggtcctagcctggcttaaacccgatcatgatggaggtagtcggatcactagctacctgcttgaaatgcgacaaaagggatctgacttctgggttgaagctggtcacaccaaacagctgactttcacagtggagcgcctcgttgagaatactgaatatgaattccgggtgaaagccaagaacgacgctggctacagtgaacccagggaagccttctcatctgtcattatcaaggagcctcaaattgagcccactgctgatctcactggaatcaccaatcagctcatcacttgcaaagcaggaagcacatttaccattgacgtgccaatcagtggtcgtcctgcccccaaagtaacatggaagctagaagaaatgagactcaaggagacagatcgaatgagtatcgcaacaacaaaagacaggaccaccctgactgtaaaggacagtatgagaggtgactctggcagatacttcctgaccctagaaaacacagccggtgttaaaacatttactatcacagttgtggtcattggaagaccagggccagtaactggtcccattgaggtctcatctgtctcggctgaatcatgtgtcctatcatggactgaaccaaaagacgatggaggcactgaaattacaaattatatagttgaaaagcgcgagtcgggtaccaccgcctggcagcttatcaattctagtgtgaagcgcacgcagattaaagtcacacacctcacaaaatacaaagaatactgtttccgggtcagctcagagaatagattcggggtcagcaagcctctggaatcagtgccaatagttgctgaacatccatttgttccaccaagtgctcctaccaggcctgaggtctactatgtgtctgccaatgctatgtcaattcgttgggaagaaccctaccatgatggcggtagtaaaatcgttggctactgggttgagaagaaagaacgtaacaccattctttgggtgaaagaaaacaaagtgccgtgcttagagtgtaactacaaagtgacaggcttggtagaaggactggagtatcagttccgaacatatgcactcaatgctgcgggcgtcagcaaggccagtgaagcttcaagacctatcatggctcaaaatccagttgatccacctggtaggccagaagtgacagatgtcacaagatcaacagtgtcactaatttggtctgccccagtgtatgacggaggcagcaaagttgtgggctacatcatagaacggaagccagtcagtgaagttggagatggtcgctggctgaagtgcaactataccattgtctctgataatttcttcactgtgaccgctctcagcgaaggggacacttatgaattccgtgtgttggccaagaacgcagcaggcgtaattagcaaaggctctgaatctacaggccctgtaacttgccgagatgaatatgctccaccaaaagctgaattggatgccaggttacaaggcgatctggtgaccatcagagcaggttcagatcttgttcttgatgctgctgttggtggcaaacctgaacccaaaatcatctggaccaaaggagacaaggaactggatctctgtgaaaaaatttctctacagtacactggcaagcgagccactgctgtgatcaaatactgtgaccggagtgacagtgggaaatacacactgacagtgaagaacgctagtgggaccaagtccgtatctgtcatggtcaaagttcttgattctcctggcccatgtggaaaactcactgtcagcagagtgaccgaggagaagtgcaccttagcctggagccttccacaggaagatggaggagcagagataactcactatattgtagagagacgggagactagcaggctcaattgggtgatcgtggaaggggaatgcctgaccgcatcctacgtggttaccagactcatcaagaacaatgaatacacattccgcgtgagggcagtgaacaagtacggcctcggcgtgccagttgagtcagagcctattgtggccagaaactctttcacgattccatcacaacctggcataccagaagaagttggggctggcaaagagcacatcattattcagtggacgaaacctgaatctgatggtggcaatgaaatcagcaactacctcgtcgacaaacgggagaagaaaagcttgcgctggacccgtgtcaacaaagactacgtggtgtacgacaccaggctgaaggtgaccagcctcatggaaggctgtgattatcagttccgagtgactgccgtgaacgctgctggcaacagtgagcccagtgaagcttcaaacttcatctcatgcagagagccatcatacacccctgggccaccttctgctccaagagttgtggataccaccaagcgcagcattagtttggcatggaccaagcccatgtacgacggtggtactgacatcataggatacgtccttgaaatgcaagagaaggacacagatcaatggtgccgagtacatacaaacgccacgataagaaacaacgaattcactgtgcctgaccttaagatgggccagaagtactccttcagggttgctgctgtgaacgccaagggtatgagtgactacagtgagacgactgctgaaattgagcccgtggaaagactagaaataccagatcttgagcttgcagatgatctgaagaagaccgtgattgtcagggctggagcctccttgcgcctgatggtgtctgtctctggaagaccttctcctgtcatcacgtggagcaaaaaaggcattgaccttgcaaatcgggcaattattgacaacacagagagctactctttactcattgtagacaaagttaatcggtatgatgctggaaaatacacaattgaagctgaaaatcagtctggcaagaaatcagcaacggtcctagttaaagtctatgatactcctggtccctgcccttcagtgagcgttaaagaagtttcgagagattctgtgaccatcacttgggaaatccccacaattgatggtggtgctccggtcaacaattacattattgagaagcgagaagccgccatgagggcattcaagacagtaaccaccaaatgcagcaagactctttaccgcatatctggactcgtcgagggaaccatgtactactttagagtgcttccagaaaacatctatggcatcggagagccttgcgaaacatcagacgcagttctagtctcagaagtacctttggtgcccacaaaactagaagtggttgatgtcaccaaatccactgtgacccttgcttgggagaaaccactctatgacggtggaagccgactcaccggatatgttcttgaggcctgcaaagccggcaccgagagatggatgaaagttgtcactttgaaacccacagtcttagagcacactgttatttccctgaatgaaggcgagcagtacttgtttagagtgagggctcaaaatgagaaaggtgtgtcagaaccgagagagatcgtcacaccagtgacagtacaagacctcagagtgttgccaacgattgacctttccacaatgccccaaaagaccatccatgtcccagctggcagaccaattgagctggtgataccgatcactggtcggccgccacctactgcttcctggttctttgctggttctaaactgagagaatcagagcgtgtcacagttgaaacccacactaaagtcaccaagctaaccatccgtgaaactactataagagatacgggagaatatacgcttgaactaaagaatgttactggaaccacctcagagacaataaaagttattattcttgacaagcctggtccaccaactgggcccatcaagattgatgaaattgatgccacgtcagttacgatatcctgggaacctcccgaattggatggtggtgctccactgagtggctatgtggtagagcagcgtgatgctcatcgtccaggatggctgccagtttctgagtctgtaacaagaccaacgtttaagtttaccagactcaccgaaggaaatgaatacgtgttccgcgtggctgcaacaaaccgcttcgggattggctcgtacttgcagtctgaggtcatagaatgccgaagcagcatcagtattcctggacctccagaaacattacagatatttgatgtctcccgtgatggcatgacacttacatggtatccacctgaagatgatggtggctcccaagtgactggatatatcgtggaacgtaaagaagtaagagctgatcggtgggtccgtgtaaataaagtaccagtgactatgacccggtaccgctccaccggccttattgaaggcttagaatatgaacatcgggtcacagccattaatgcaagaggaactggaaaaccaagtcgtccttccaaacccaccgttgccatggatccaattgctccaccaggaaaaccacaaaatccaagagttacagatacaacaaggacttcagtctccctggcctggagtgttccggaagatgaaggtggatctaaagtcacagggtacttgatcgaaatgcaaaaagtagatcaacgtgaatggaccaaatgtaacaccaccccaaccaagattcgggagtataccctaacacacctacctcagggcgctgaatacagattccgtgtcctagcctgtaatgctggtggacctggagaacctgctgaggtaccaggaaccgtcaaagtcacagagatgctggaataccctgactatgaacttgatgagagataccaggaaggtgtctttgttcgacaaggtggggtcatcaggcttaccatcccaatcaaaggaaaaccattcccagtatgtaaatggaccaaggaaggccaagacattagtaagcgtgccatgattgcaacatcggaaacacatactgagcttgtgatcaaagaagcagacagaaacgattctggaacttacgacttggttctggaaaacaaatgtggcaagaagaccgtttacattaaggtcaaggtgataggaagtcccaacactccagaagggccactggaatacgatgacatacaagcccgctctgtaagggtcagctggagacctcctgctgacgatggtggtgctgacatcctgggctacatccttgagagaagagaggtacctaaggctgcctggtataccattgactccagagtccgaggcacatctctggtggtgaaaggcctcaaagaaaacgtggaataccatttccgtgtctcagcagaaaaccagtttggcataagcaaacccttgaaatctgaggagccagtcataccaaagacaccactgaatccaccagaaccaccaagcaatcctcctgaagtacttgatgtgaccaaaagttccgttagcttgtcatggtctcgacctaaagatgacggcggctctcgagtgacgggctactacattgagcgcaaggagacatccactgacaagtgggtcagacacaacaaaacccagataaccaccacgatgtacactgtcaccggcctcgttcccgatgctgagtaccagttccgcatcatcgcacagaatgacgttggccttagtgagaccagccctgcttctgaacctgttgtttgcaaagatccctttgataagccaagccaaccaggagaacttgagattctctcgatatccaaagacagtgtcaccctccagtgggagaaacccgaatgtgatggtggcaaagaaatccttggatactgggttgaatacagacagtctggagacagtgcttggaagaagagcaataaggaacggatcaaggacagacagttcaccatcggcggtttgctagaagctactgaatatgagttccgagtatttgctgagaacgagactgggctcagccgaccacgtagaacagctatgtctgtcaagactaaactaacatctggagaagccccaggagtgcgcaaagaaatggctgatgtgaccaccaaattaggtgaagctgcacaactctcatgccagatagttggaaggccccttcctgacattaaatggtaccggtttggtaaagagctcatacaaagccggaagtacaaaatgtcctcagatgggcgcacgcatactctgacagtaatgacagatgaacaagaagatgaaggtgtttatacatgtgtagccacaaatgaagtaggagaagtagaaagcagcagcaagcttcttctgcaagcggcaccacagttccatcctggttacccactgaaagagaagtattacggggccgtggggtctacgcttcggctccacgttatgtatattggccgcccagtacctgccatgacttggttccatggccagaaacttttgcaaaactcagaaaaaatcaccattgaaaacactgagcactatactcaccttgtcatgaagaatgtccaacgaaagactcatgctgggaaatacaaggttcagctcagcaatgcctttgggacagtggatgccaccctagatgtggaaatacaagataaaccagacaagcctactggacccattgtgattgaagcactactcaagaactcggtggtgatcagctggaaaccacctgctgatgatggcggctcctggatcaccaattacgtggtagagaaatgtgaggccaaagaaggtgctgaatggcaattggtgtcttcagccatctcggtgacaacctgcagaattgtgaacctcacagagaatgccggctactatttccgggtctcagctcagaacacctttggcatcagtgagccactagaggtcgcctccattgtgatcatcaagagtccattcgaaaagccaggtgttcctggtaaaccaaccatcactgctgtcacaaaggattcttgtgttgtggcttggaagccacctgcaagcgatggcggtgcaaagatcagaaattactaccttgagaggcgcgagaagaagcaaaacaagtggattgctgtgacgacagaggaaattcgagaaaccgtcttctcagtgcaaaaccttattgaaggtcttgaatatgagttccgtgtgaaatgtgaaaacctgggtggagagagtgaatggagtgaaatatcagaacccgtcactccaaaatccgacgtcccgattcaggctccacacttcaaggaggagctgagaaacctgaatgtaaggtatcagagcaacgccactctggtctgcaaggtgaccggtcacccaaagcctattgtgaaatggtacagacaaggcaaagaaattatcgccgatggactcaagtacaggattcaagaatttaagggcggttaccaccagctcatcattgcaagcgtcacagatgatgatgccacggtgtaccaagtcagagccaccaaccaagggggctccgtgtctggcactgcttccttggaagtggaagttccagctaagatacacttgcccaagactctcgaaggcatgggagcggtccatgctctccgaggggaagtggttagcatcaagatccccttcagtggtaagccagaccccgtgatcacctggcagaaaggacaagatctcatcgacaataatggccactaccaagtgattgtcacaagatccttcacgtcacttgtcttctccaatggagtggagagaaaagatgctggcttctatgtcgtctgtgctaaaaacagatttggaattgatcaaaagacagtcgaactggatgtggctgatgtccccgacccacccaggggtgtcaaagttagtgacgtctcacgcgattctgtcaacttaacatggacagagccagcttctgatggtggtagcaaggtcaccaactacatcgtggaaaagtgtgcaactactgcagaaagatggctccgagtgggacaggcccgagaaacccgttacactgtgatcaacttgtttggaaaaacaagttaccagttccgagtaatagctgaaaataaatttggcctgagcaagccatcagagccctcagaaccaaccgttaccaaagaagataagaccagagctatgaattatgatgatgaggtggatgaaaccagagaggtcaccacgactaaagcatcacactccaaaactaaagaactctacgagaaatacatgatagctgaagatctggggcgtggtgagtttggaattgtccaccgttgcgttgaaacatcctcaaagaggacattcatggccaaatttgttaaagtcaaaggaaccgatcaggttttagtcaagaaagagatttccattctaaacattgctaggcacaggaacatcttatacctccatgaatcatttgaaagcatggaagagttagttatgatctttgaatttatatcaggactcgacatatttgaacgcatcaacacgagcgcctttgagcttaatgaaagagaaattgtaagctatgtccgccaagtctgcgaagcactggagttcttacatagccagaatattggccactttgacattcgaccagaaaatatcatttaccagacaagaaagaactccactattaaaataatagagtttggtcaagcccgtcagctgaagccaggagacaactttaggctgctgttcactgcccctgaatactatgcccctgaagtccaccagcatgatgttgtcagcactgccacagacatgtggtcgcttggtacattggtgtatgtgctactgagtggaatcaacccatttttggctgaaactaaccaacagatgattgagaacatcatgaacgctgaatatacttttgatgaagaagccttcaaagaaattagccttgaagcgatggattttgtcgaccggctattggtgaaagagcgaaaatctcgcatgacagcatcagaggccctgcagcacccatggctgaagcaaaggatcgacagagtcagtactaaagtcatcagaacactgaaacaccggcggtactaccacaccctgataaagaaagacctcaatatggttgtatcagcagcccggatctcctgtggtggtgcaatacgatctcagaggggagtgagcgtggctaaagttaaagttgcatccattgaaattggtccggtctctgggcaaataatgcacgccattggcgaagaaggcgggtatgtcaaatatgtttgcaagatcgaaaattatgatcagtctacccaggtgacctggtactttggcgtgagacagctggaaaacagtgagaaatatgaaatcacctatgaagatggagtggccaccatgtatgtcaaagacatcaccaaatttgatgatgggacctacagatgcaaagtcgtcaatgactacggtgaagatagctcttacgcagagctgttcgttaaaggagtgagggaagtttatgactactattgccgccgaaccaagaaagtcaagcgcagaacagatgcgatgcggctccttgaaaggccaccagaatttaccctgcctctctataacaagacggcatacgtgggtgaaaatgtccgttttggagtaactattaccgtccacccagaacctcgtgtgacgtggtataaatcaggtcagaaaatcaagccaggtgatgatgaaaagaaatacacattcgagtctgacaagggtctttatcaattaacaatcaacagcgtgaccacagacgatgatgctgaatacaccgttgtggcaaggaacaaacatggtgaagacagctgtaaagcaaagctgacggtgactttacatccacccccgacggaaaccacgctcagacccatgttcaagcggctgctggcaaatgccgaatgccatgaaggccaaagtgtctgctttgagatcagagtttctggcatccctgcaccaacattaaaatgggagaaggatggccagccgctgtccctcgggccccacattgaaattgtccatgaaggcttagattattatgcactgcatatcagggacactttgccggaagacacaggttattacagagtcacggccacaaacacggccggatccaccagctgccaggctcacttacaggtagagcggttgcgctacgtaaagcaggaattccagagtaaagaggaacgtgagcgccatgtccaaaaacagattgacaagacactgaggatggctgaaatcctttctggaactgaaactgtgccattgactcccgtagcccaagaggctctgcgagaagctgccattctttacaaaccagcagtgagcaccaagactgtcaaaggagaataccgacttcagacggaggaaaagaaagaggagagaaaactccgcatgccttacgaagtcccagagccccgcaggttcaaacaagccacagtagaagaagaccagcgcatcaagcagttcgtgcctatgtctgacatgaagtggtataagaagatccgggatcaatatgaaatgcctgggaaacttgacagagttgtccagaaaaggcccaagcgcatccgcctttcaagatgggaacagttctatgtgatgcctcttcctcgcattactgaccaataccgacctaaatggcggatccccaaactgacccaagacgatctggaaatggtgaggccggcccgacggcgtaccccttccccagattatgatctttactattatagaaggaggagacgctctctgggtgacatgtcagatgaggaactgctcctccccattgatgactacctggcgatgaagagaaccgaggaagagaggctgcgtctggaggaggagcttgaactgggcttctcggcttcacctcccagccgaagccccccgaggtttgagctgtctagcctgcgctattcttcaccgccagctcatgtcaaggtggaagacagaagaagagacttcaggtactcgacctatcacgtccccacaaaggaggaaaccagcacgagttatgcagagctgcgggaacggcatgcccaggcctcatacaggcagccgaagctacggcagagaatcatggccgagaaggaggaagaggagctactgcggccagtgacaaccacccagcgtctctcagaatacaagagtgagctggactacatgtcaaaagaagaaaagtctaaaaagaaatcaaaacgacagagacaagtgacagaaataacggaaatcgaagaggaatacgaaatctcaagacgggctcaaagggaatcatcctcctccgtgtccagactactgagacgccgtcgctccttgtctccaacttatattgagttaatgagaccagtgtctgagctgattcggtcccatccacgacctgctgaggaatatgaagatgatgcagaaagaaggtctcctactccagagagaactcgcccacgttctcccagccctgtgtctagcgagcgatccctctcaagatttgagaggtctgcaagatttgacatcttctccaggtacgagtccatgaaagctgccttaaaaactcagaagacatcggaaaggaagtatgaggttttgagtcagcagcctttcacactggaccatgcccctcgaatcacactgcggatgcgctcccacagggttccctgtggccaaaacacacgcttcatcctaaacgtccagtcgaagccgactgccgaagttaaatggtaccacaatggtgtagaactccaagagagcagtaagattcattacaccaacacaagtggggtcctgaccttggagattctggactgccagactgaggacggtggaacctaccgtgccgtgtgcaccaactacaaaggagaggcatcagactacgcaaccctggatgtaactggcggagcttataccacctatgcatcccagcgcagagatgaggaggtccccaagtcagtcttccctgaactgacaaaaacagaggcatatgcagtctcgtcgttcaagagaacatctgagctggaagctgcttcttcagtcagggaagtgaagtcacaaatgacagagacgagggaaagtctctcaacctatgagcattacgcctctgcggaaatgaaaagcgccacatcagaggaaaagtcactggaagaaaaagccacggtgagaaagattaagacaacactggcagcaagaattttaaccaagccacgctccataactgtccatgaaggtgagtctgcgaggttttcctgcgacactgatggggagccggtaccaacagtgacctggctgcgtgaaggacaagtggtgagtacttctgctcgccaccaagtgaccaccaccaagtacaagtcgacctttgagatttcttcagttcaggcctctgatgagggcaactacagcgtggtagttgaaaacagcgatgggaagcaagaagcacagttcaccctgaccgtgcaaaaggccagggttattgaaaaggctgtgacgtcaccacccagagtcaagtccccagagcctcgggtgaagtccccagaaacagtgaagtctcccaaaagagtgaaatctccagaaccagtaacttctcatccaaaagccgtgtcacccacagagacaaagccaacagagaagggtcaacatctcccagtctctgccccaccaaagataactcagtccctgaaagcagaagcttctaaagacattgcaaagctgacctgtgcggttgaaagtagtgcactgtgtgcaaaagaggtcgcctggtataaagatggcaagaaactcaaggaaaatgggcattttcaatttcattactcagcagatgggacctacgaactcaaaattcacaaccttagcgaatctgattgcggagagtatgtttgtgaggtctctggtgaaggaggaacttccaaaaccagcttccagtttactggacaatccttcaagagtatccatgagcaggtgtcaagcatatcagaaactacaaaatcggttcagaaaactgctgagtcagcagaagccaagaaatccgctcagaaaactgctgagtcagtagaagataagaaagcagcacagaaaactgtggaatcagcagaagcaaagaagccagcacagaaaactgctgagtcaccagaagccaagaaacctgcacagaaaactgctgagtcaccagaagccaagaagcaggaaccaatagctcctgaatcaatttcctcaaagccagtaattgttactgggctgcgggatacaacagtttcttcagacagtgttgctaaatttacaattaaagttactggagagccccagccaactatcacctggacaaaggatggaaaggctattgcacaaggcagtaaatacaaactctctagcaacaaagaagaattcatcttagaaatcctcaagaccgagacatctgatggcggactttacgcctgtacagtaacaaattctgctggatctgtgtcctcgagctgcaagctgacaataaaagctgtaaaagacaccgaggcacagaaagtatctacccagaagacctccgaagtcacatctcagaagaaagcgagtgcccaagaggaaatttctcaaaaagccctaacttctgaagaaatcaaaatgtcagaagtaaaatctcatgaaacgctggccatcaaggaggaagcgtccaaagttctgattgctgaggaggtcaagaggtcagcagcagcctccctggagaaatccatcgtccatgaagaagtcaccaaaacctcacaggcatccgaagaagtcaaaactcacgcggagatcaaaacactgtctacccagatgaacataaccaagggccagcgagcgaccctgaaagccaacattgctggggccacagatgtgaaatgggtcctgaacggcactgagcttccgaactcagaggaatacagatacggggtatctggcagtgaccaaactctcaccatcaaacaagccagtcacagagaggaagggatcctcagctgcataggcaaaaccagccagggagttgtcaagtgtcagtttgacttgaccctgagtgaagaactctcggatgctccaagcttcatcacacagcccagatctcaaaacattaacgagggacaaaatgttctcttttcttgtgaggtcagcggggagccgtcccctgaaattgagtggtttaaaaataaccttccaatttccatttcttcaaatatcagtgtgagtcgctccagaaacgtgtacactcttgaaatccgaaatgcggctgtaagtgacagcggaaagtacacaattaaggctaagaatttccacggccagtgctctgcaacagcgtccctcacagtgctccctctggtggaagaaccaccgagagaggtggtattgaaaacgagcagtgacgtgagcttgcacggaagcgtctcgtctcagtcagtccaaatgtctgcctctaagcaggaggcatccttcagcagcttcagcagcagcagcgctagcagcatgactgaaatgaagtttgcgagcatgtctgcccaaagcatgtcttccatgcaagagtcctttgtagaaatgagttccagcagttttatgggaaaatctagcatgacacaactggaaagctcaaccagtagaatgctcaaagcaggcggaagaggaattccacctaaaattgaagctcttccctctgatatcagcatcgacgaaggcaaagtcctaacagtagcctgtgcctttactggggagcctactccagaaataacatggtcctgtggtggaaggaaaatccaaaaccaagaacaacaaggaagattccacattgaaaacacagatgacctgaccaccctgatcatcatggacgtacagaaacaagatggcggactttataccctaagcttagggaatgaatttggatctgactctgccactgtgaatattaatatccgttctatg

SEQ ID NO: 42 - DNA, 2960 bp, Mus musculus
gagctgcagcagactgccggccaccaggttgcccctctctatccagggacatctctcctctcagttgactggccttggtcttctctcaccacagctggaaaagaaggggcaatctgacaacctgatacactcctctcctctttctgcagctagaaagacttgagttagacaagcagacgcacacgcctacctacctcatgactacagaaaacggagcagttgagctgggaagccagagcctgtcaacagaacagacacctaaagccgctgcaggtgatggaccttcagcttcagaaaaagaacccagcgccccagccacagagaaagacctgagcccccctaacgcgaagaaagacccgggcgcgccagatccaaagaacaatccagatccaccctccctgaagaaagatcccgccaaagcccctggcccagagaaaaagggtgacccggtcccagcttcagccagcagccagggcccttcaggagagggagatggaggtgggggacctgctgaaggcagtgaggggcctcctgcagccttgcccctgcccactgctacagccgaggccagcatccagaagctggaccccacgcaagcaccctcaggcaaccagggatccggagaagccaaggcaggcaagaaggcagcagaatgccgcgaagcaggaagaaggggctcacctgcctttctccacagccctagctgcccggctatcatctcctgctctgagaagacactggctgtgaagcccctaagcgagacaacagacctcgtctttacaggggtgtctgtgacccctgacccccaagatcctggtccagtcaaagcaggagggacaaacgccctggcagagaagaagaaggaagaggcagagaaagcctcaggccaggccgggcaggctaaggtgcaaggggacaccccccagaggatcgggttccaggctgttccctcagagagagtggaggtggggcaggccctctgtctcactgccagggaggaagactgcttccaaatcctggatgattgtccaccgcccccagcccccttcccacacaggatcgtggagctgaggaccggaaatgtcaacagtgaattcagcatgaactcaaaggaggcactgggaggtggcaaatttggagctgtgtgcacctgcacggagagagccacaggcctcaagctggcagccaaggtcatcaagaaacagacacccaaggacaaggaaatggtgttgctggagatcgaggtcatgaaccagctgaaccatcgcaacctgatccagctgtacgcagccattgagacctctcacgagatcatcctgttcatggaatacatcgagggcggcgagctctttgagaggattgtggatgaagactaccatctgacggaggtggacaccatggtgttcgtcaggcagatctgcgacgggatcctcttcatgcacaagatgagggtcctgcatctggacctcaagccagagaacatcctgtgtgtgaataccactgggcacttggtgaagataattgactttggcttggcgaggaggtataaccccaatgagaaactgaaggtgaattttgggaccccggagttcctgtcaccggaggtggtgaactacgaccaaatctctgacaagacagacatgtggagccttggggtgatcacctacatgctactgagtggcctctctcccttcctgggagacgatgacacggagaccttaaacaatgtcctgtctgccaactggtactttgatgaggagacctttgaagctgtgtcagatgaggccaaagactttgtctccaatcttctcacgaaggaccagagtgccagaatgagtgctgagcagtgcctcgcccacccctggctcaacaacctggcagaaaaagccaaacgctgcaaccgtcgcctcaagtcccagatcctgcttaagaaatacctcatgaagaggcgttggaagaaaaacttcattgctgtcagcgcagccaatcgcttcaagaagatcagtagctcgggggcactgatggctctgggggtctgaaccccaggagcagctaagcctggatgcagctacgcggtggtcaaggctgaaaccacacagctcagaaggccagagacagccagctggccagatctctagagcaggctggtcaggacaaagctgcatcaggcccggaggcttggggctccgcaggtccttaggcgataccgcttcccctatgtgaacatggagtggggcctggaatccatctcgctaccgcctcctcagcggggctgtggcctgtcagccccacccagactccaaggacggccagaccattccctagtctctccctagcttccccctttgaactgctgccctagagcctcttctctgccccaccttgggcatccttgcctggagcgggaaggcgggggttcagcaggtgggctgctatggtggtgggtggagagcttccagcaggggtcagaatgcagtccagctgccgggggagacagagcaggctttgtgtgagaggacctctgtggcctgcttcacactccccacagatagagcctcgcacacaccatctggcctcctggcccccaccttctgtttttgtgaccaccaacacacaggaactctgagagagaaagccagcccgggcctggagtggtggtggtggtggtggtggtggtggtggtggtggtggtggtggcggggagagacctgggaggcatgagactaccccaccaagtttacttggggactgagtcttcccagcctgactactctgtgcccatcccaggagcagtcacaaccccaaataacaggatgaactggcccacgaggagtatgaagccatcgggcagaccccaacctgctctcagcttgtgccttgtaaataaaaacacaggttggaggcagcctccttccctttgcacgtgcacacacgtgtgtgtgataaaaaaaaaaaaaaaa

SEQ ID NO: 43 - DNA, 1173 bp, Mus musculus
atgttgaaggtgaagaggctggaagaaatcagctcgtgccacagcagcaacccgctggagaaggtggcgtttttccagtgcatggaggaggtggagaaggtgaaatgcttcctggaggagaattcgggggatctggacctgcagtctggagacaatgaggaaaatgtatggtccaaccgtgcactagatgaaaggataattgtcaaaggaggaaggacatcagccctcacagatgacatccctgctcctgccgctccatttgatcatcggatggtaatggccaaacatgcttcagtggacaatctgtacaccgtgagcaaatctgagatcctaggaggggggcgttttggtcaggtacataagtgtgaagagaaagcaacaggcctgaagctggctgctaaaatcattaagactagaggtgcaaaggacaaggaggatgtgaagaacgagatcagcgtcatgaaccagctggaccacgtgaacctcattcagctctatgatgcctttgagtccaagcatgacatcatccttgtcatggagtatgtggagggtggggagctctttgaccgcatcattgatgaaaactgcaacttgacagagctggacaccatcctgttcatgaagcagatctgtgaggggatacggtacatgcaccagatgtacatcctccacttggatctcaagcctgagaacatcctgtgtgtgaatcgggatgctaagcaaataaaaattattgattttggattggccagaagatacaagcccagagagaagctgaaggtgaactttggaaccccagaatttcttgcccctgaagttgtgaactatgatttcgtttccttttctacagatatgtggagtgtgggcgtcatcacatacatgctactcagtggcttgtccccctttttgggagacaatgatgccgagacactgaccaacatcctggcgtgccggtgggatttagaagatgaggaatttcaggatatctcggaggaggcaaaggagttcatctccaagctcctgattaaggagaagagttggagaataagtgccagcgaagctctcaagcacccatggttgtcagaccacaagctccactccaggctgagtgcacaggtgaccatgtttcctgtttcctctttgcttgccatttgcctgtctcatcagatgtga

SEQ ID NO: 44 - DNA, 2155 bp, Mus musculus
ctggctcggattggctggggtacagcaggtgccgcgtccggattgatcaaagccaggtgggcgggtctgtcgcgcagggcgactctcccgggaggcgcgtgccccggctcagtagcgttggggctggcgcgcgcgacgaatcttaacgctgcgccgtctgcaggcgcttccgggccgccagattccctgccttccaccctggcgccccccagccctggctctccggccgctctgccccgggcatccacgccctgcgggctcagcggattcagcgggctcaatatacgcagcacctcctccatgttgaccaagcctctgcaggggcatccttcgccccctgtgacccccacgcagcctccaggaggcaaggatcgggcagctttcgaggccgaataccgacttggccccctcctgggtaagggaggctttggcaccgtcttcgcgggacaccgcgtcacggatagacgtcaggtggccatcaaagtaatctcccggaaccgtgtgctaggctggtccaccgtgtcagactcagtcacctgcccacttgaggttgcgctgctgtggaaggtgggtgaaggcaatggccatccgggtgtgatacgccttcttgactggttcgaaacacccgaaggcttcatgctggtccttgagcggcctatgcctgctcaggatctcttcgactatatcacagagaaggggccgctgggtgaaagctgtagccgcagcttctttacccaagtcgtggcagctgtccagcactgccacgcccgtggagttgtccatcgggatatcaaggatgagaacatcctgatcgacctatgccggggttccattaaactcattgattttggttccggcgccctgcttcacgatgagccgtacactgactttgatgggacaagagtgtatagccctccagagtggatctcgcgacaccagtaccatgccctgccagcgaccgtctggtcactaggtgtcctactctatgacatggtctgtggggacattcccttcgagagagaccaggagattctggaggctgagctgcacttccctgctcatgtctcccccgattgctgtgccctaatccgccggtgcctggcccctaaaccctgctcccgaccctcactggaggagattctgctggacccctggatgcaatcaccagctgaagaaaagcccatcaactcctccaaaggaagccccacccccttgccctggtccctgcttccctagacccagccaggctctctggttggaatcccatggtcacgctacagggatagatggacatctgttgacctggttatacaggttgttaaaaatccagtattactaaggtcagggaatagggatcaggggtcagaagaagatgatagccaagtctgcccagttcctatccaatctggaaggagctctcctcccagaacctgtggtccctaatttgggagggggagttacttgtttcttgttctgttaaagatgtttatttggttggattccttccctctgggccctaagattcttaatctgacattgtagtccctacactggcacttcctatactaccacaaaccacgtacacacttagttcaaatgctctcacttgggcaagggtgctttccttaaaattacccccatccccagcagctctttaggcaaagggccttaccctgggatctcattctgttgctgcctgcctgccttagcccagacttggtgattctgggggaggtactgctcattaattagttaatatcccacgcttccttcctttttcttcctttgtttggtgaggggaccctactgttatcccaagtgctcttattccggtgagaagaacctcacttccatgatttgggaaggaatgggagatggacatcaccggacaccaccagagactaggatgggatggatggttttggggggatgagatggaggaaataagtcttattgttgttctcctggggtcccccctttccaacttttgctgcctcctcctgagccaggattgtccagtggttgaaatgtaaataattctgtactggaggtggagagcggcaagtgccctcctgtcccttcctcccccctgcctggattatttaaaaagccatgtgtggaaacctatttaataaataatgaagtcacaaaaaag

SEQ ID NO: 45 - DNA, 10010 bp, Mus musculus
  misc_feature (1856)..(2086): n is a, c, g, or t
ggaaagcaagatggaggctcgctgctgccgccggcgttcgtgatcgcggagcttcgcagccccggcccccgccctcgcgtgtccgcgccgctgcccgtgccccggccggccacgccgaggccgtggctccgcgcgcccgctccgcgccaggctcgcggctcccgggcggtgtcctcgtctatgtgggcgcgctcctcgggccgagccgccgccgcccgccgccccggggctgtgcgtccgcgcgccgggcgcgggcagctgggtgctcggcgccgccaggccaggcgcaggcggctgggtgcgcggagctaggggcgcggggcccgaggcgggctcgtccgccgccgaagccatgagcggcagcagcggcggtgccaccgccccggccgcgtcctccggccccgcggcagcggccagcgcggcgggctccggctgcgggggcggcgccggcgagggcgccgaggaggccgccaaggacctagccgacatcgcggccttcttccgatccgggtttcggaaaaatgatgaaatgaaagctatggatgttttgccaattctgaaggaaaaagtcgcctatctttcaggtggtagagataagcgtggaggtcccattttaacatttccagcccgcagcaatcatgacagaatacggcaggaggacctcaggaggctcatttcctatttagcctgcattcccagtgaggaagtctgcaagcgagggttcacagtgattgtggacatgcgcggctccaagtgggactccatcaagccgctgctgaagatcctgcaggagtcctttccgtgctgcatccacatagccctgataatcaagcccgacaacttctggcagaaacagaggacgaattttggcagctccaaatttgaatttgagacaaatatggtctccttagaaggccttaccaaagtagttgatccttcccagctaactcccgagtttgacggctgcctggaatacaaccatgaggagtggatagaaatccgagtagctttcgaggagtacattagcaatgcagcccatatgctgtcacggctagaggaacttcaggatgttctcgccaaaaaggagttgcctcaggacctagagggggctcggaacatgatcgacgagcactcccagttgaagaagaaggtgatcaaggcccccattgaggacttggacttagaagggcagaagctgcttcagcggatacagagcagcgacagtttccccaaaaagaactcaggctcgggcaatgcagacctgcagaacctcctgcccaaggtgtccaccatgctagacaggctgcactccacccggcagcacctccaccagatgtggcacgtgaggaaactgaagctggaccagtgcttccagctgcggctgttcgaacaggatgctgagaagatgtttgactggatcactcacaacaaaggcctgtttctgaacagctacacggagatcgggaccagccacccgcatgccatggaacttcagacgcagcacaatcattttgccatgaactgtatgaacgtatatgtaaatataaaccgcataatgtcagtggccaatcgcctggtggagtcgggccactacgcctctcagcagattaagcagattgcaaatcagctggaacaagagtggaaggcgtttgcagcagccttggacgagcgcagcaccttgttggacatgtcctccatctttcaccagaaggctgagaagtacatgagcaacgtggactcgtggtgtaaggcctgtggtgaagtagaccttccctcggagctgcaggacctggaagacgccattcatcatcaccagggcatctacgagcacatcaccctcgcctactcagaggtannnnnnnnnnnnnnnnnnnnnnnnnnnnnnnnnnnnnnnnnnnnnnnnnnnnnnnnnnnnnnnnnnnnnnnnnnnnnnnnnnnnnnnnnnnnnnnnnnnnnnnnnnnnnnnnnnnnnnnnnnnnnnnnnnnnnnnnnnnnnnnnnnnnnnnnnnnnnnnnnnnnnnnnnnnnnnnnnnnnnnnnnnnnnnnnnnnnnnnnnnnnnnnnnnnnnnnnnnnnnnnnnnnnnnnctggactggatagagaaccacggagaagcgtttctgagcaaacacacgggcgtgggcaaatcccttcaccgggccagagctttgcagaaacgccacgaggacttcgaggaagtcgcacagaacacgtacacaaacgcagataaactgctagaagcagcagagcagctggctcagacgggggaatgtgaccccgaagagatttatcaggctgcccatcagcttgaagaccggatacaagattttgttcggcgagttgaacaacgaaagatcctgctggacatgtctgtgtcatttcacacgcacgtaaaagagctctggacatggctggaggagttacagaaggaactgctggacgacgtgtacgccgagtcggtggaggccgtgcaggacctcatcaagcgattcggccagcagcagcagaccaccctgcaggtgactgtcaacgtgatcaaggaaggagaagacctcatccagcagctgagggactccgccatctccagtaacaaaactccgcacaacagttccatcaaccacatcgagacggtgctacagcagctggacgaggctcagtcccagatggaggagctcttccaggagcgcaagatcaagctggagctcttcctgcagctgcgcatcttcgagcgggatgccatcgatatcatctcggaccttgagtcgtggaatgatgagctttcccagcaaatgaatgacttcgatacggaggacctgacgatcgcagagcagcgcctacagcaccatgcagacaaagccctgaccatgaataacttgactttcgatgtcatccaccaaggacaggatcttctgcagtatgtcaatgaggtccaggcctctggtgtggagctgctttgtgacagagatgtggacatggccactcgggttcaggacctcctggagtttcttcatgagaagcagcaggagttggatttggcagctgagcagcatcggaaacacttggagcagtgtgtgcagttgcgccacctgcaggcggaagtgaagcaggtgctgggctggatccgaaatggagagtccatgctaaatgctgggctcatcacggccagctcgctgcaggaagccgagcagctgcagcgagaacacgagcagttccagcatgcgattgagaaaacgcaccagagcgcgctgcaggtacagcagaaggcggaggccatgctgcaggccaaccactatgacatggacatgatccgggactgtgcagagaaggtcgcctcgcactggcagcagctcatgctgaagatggaagaccgcctcaagcttgtcaatgcctctgtcgccttctacaagacttctgagcaggtctgcagtgtcctggaaagtctggaacaggagtacaagagagaagaggactggtgtggcggggccgacaagctgggccccaattctgagactgaccacgtcacccccatgattagcaagcacctcgaacaaaaggaagccttcctgaaggcttgcacactggccaggaggaacgcagacgtcttcctaaagtacctgcacaggaacagcgtgagcatgccggggatggtgacgcacatcaaagctccggaacagcaagtaaaaaatatcttgaatgaactcttccagcgggaaaacagggtattgcattattggaccatgaggaaaaggcggctggaccagtgtcagcagtacgtggtcttcgagaggagcgccaagcaggcattagagtggatccacgacaatggggagttctacctttccacacatacctcaacagggtccagcattcagcacacacaggagctgttgaaagaacacgaggagtttcagataactgccaagcaaaccaaagagagggtgaagctattgatacagctggccgatggcttttgtgaaaaagggcatgcccatgcagcagaaattaaaaaatgtgtgaccgcagtggataagaggtacagagatttctctctgcgcatggagaagtaccggacctctttggagaaagccctggggatttcttcagattccaacaaatcgagtaaaagcctgcagttggacatcatccctgccagtatccccgggtcagaggtgaagcttcgggatgctgcccacgagcttaatgaagagaagcggaagtctgcccgcaggaaagagttcatcatggctgaactaattcaaacggaaaaggcttatgtcagagacctccgagagtgtatggatacctacctgtgggaaatgaccagcggcgtggaggagatcccgccaggcattgtcaacaaggagctcatcatcttcgggaacatgcaggagatctacgagttccacaacaacatcttcctgaaggagctggagaagtacgagcagctcccagaggacgtgggacactgcttcgtcacctgggcagacaagtttcagatgtatgtcacatactgcaaaaataaacctgattctacacagctgatactagagcacgcagggtcctactttgatgagatccagcagcggcatggcttagccaattccatctcttcctacctgatcaaaccagttcagcggataacaaagtatcagctccttttaaaggagctgctcacatgctgtgaggaaggaaagggggagatcaaagatggcctggaggtgatgctcagcgtgcccaagcgagccaatgatgccatgcacctcagcatgctggaagggtttgacgaaaacattgagtctcagggagagctcatcctgcaggagtccttccaagtgtgggacccgaaaaccttaattcggaagggtcgagaacggcatctcttcctttttgaaatgtccttggtgtttagtaaagaagtgaaagactccagcgggagaagcaagtacctgtacaaaagcaagctgtttacctcagagttgggtgtcacagaacacgttgaaggagatccttgcaaatttgcactgtgggtggggaggacgccaacttcagataataaaattgtccttaaggcatccagtatcgagaacaagcaggactggatcaagcacatccgtgaggtgatccaggagaggacggtgcacctgagaggagccctgaaggagcccattcacatccccaaaacagctccggcagcaaggcagaaggggaggagggatggagaagacctggacagccaaggggatggcagcagccagcccgacaccatttccatcgcctccaggacatctcagaacacactggacagtgataagctttctggtggctgcgagctgacggtcgtgattcatgacttcacagcctgcaacagcaatgagctgaccatccggcgtggccagacagtggaggtcctggaacggcctcacgacaagcccgactggtgtctggtgcgcaccactgacaggtcccctgcagcagaaggcctcgtgccctgtggctcactgtgcatcgcccactcccgaagtagcatggagatggagggcatcttcaaccacaaagactcactgtcggtctccagtaatgacgccagcccaccggcctctgtggcttcccttcagccccacatgatcggagcacagagttcaccaggtcccaagcggcccggcaacaccctgcgcaagtggctcacgagccccgtgcggcggctcagcagcggtaaggccgatgggcatgcgaagaagctggcccacaagcacaagaagagccgggaggtccgtaagagcgcggatgctggatcgcagaaggattcggatgacagcgctgccaccccgcaggatgaaaccatcgaagagagaggacggaacgagggtctcagcagtggtacgctgtccaagtcctcgtcctcgggcatgcagagctgcggagaagaagaaggcgaggagggcgccgacgctgtaccactgcctccccccatggccattcagcagcacagcctccttcagccggactcgcaggatgacaaggcctcttcaaggttattggtccgccccaccagttctgagactcccagcgcagctgagctcgtcagtgctattgaagaactcgtgaaaagcaaaatggcactggaggatcgtcccagctcgctgctcgtcgaccagggagacagtagcagcccatccttcaatccctcagacaattccctcctctcatcctcctcacccattgatgagatggaagaaagaaaatgcagctctctgaagagaaggcactatgttttgcaagagttagtggagacagagcgagactatgtacgggaccttggctgtgtggttgagggctacatggcacttatgaaggaagacggcgttcctgatgacatgaagggaaaagacaagatcgtgtttggcaacatccatcagatttatgactggcacagagacttttttttaggagagttggagaagtgccttgaagatccagaaaaactcggatccctttttgtaaagcacgagagacggttgcacatgtacatagtttattgtcaaaataagccaaagtctgagcacattgtgtccgagtacatcgacaccttttttgaggacttaaagcagcgcctgggccacagactgcagctcactgatctgttgatcaaaccggtgcagagaatcatgaagtaccagctgctcctgaaggacttcctcaagtactcaaaaaaagctagcctggacacatccgaattagagaaagctgtagaagtcatgtgcatcgtgccgaagcgctgtaatgacatgatgaacgtcgggcggctgcagggatttgacggtaaaattgttgcccagggtaaactgctcttacaggacacattcctggtcacagatcaagacgcaggacttctgcctcgatgcaaagagaggcgggttttcctctttgaacagatcgtcatattcagcgaaccacttgataaaaaaaagggcttttccatgccaggatttctgttcaagaacagtatcaaggtgagttgcctctgcttggaggaaaatgtggagagcgatccctgtaagttcgccctgacgtccaggacgggcgatgccgtggagactttcgttttgcattcatccagtccaagcgtccggcaaacgtggatccatgagatcaaccaaatcttagaaaaccagcgcaactttttaaacgccttgacatcacccatcgagtaccagaggaaccatagtgggggcggcggcagtggcagcgggggcagcagcggcgggggcgggggcagcggcggcagcggggcctccagcggaggcagcagcagccatggcagtggccccagcagctgtagcagtggccccagctcgagcaggagcaggccctccaggatcccacagcctgtcagacaccacccccccatgctggtctcctctgcagcctcaagccaggcagaggcagacaagatgtcaggtatgtctgctcccagcccctcactgcctacccccagcagcagcctggcccttgaggccagccttggccagcccagcaggctccccctgagtggagactccgaaggtcatgagcgagaaacagaacccattcccaagatgaaggtgatggagagcccccggaaggccccggggagtacttccggtacaagccaagacggaaacaccaaggatgcccggggaaacctgggctcactgcctctgggcaagactagacctggggccgtctcaccgctgaactctcctctctccactacgttcccttctccttttggcaaggaggcctttcctcccagcagccccttgcagaaggggggctccttctggagctccattcctgcttcccctgccagccggccaagctccttcaccttcccgggggacagtgactccctccagcgacagacgcaccgccatgcagcccccagcaaggacacagaccgcatgagcacgtgctcctcggccagcgagcagtccgtgcagtccactcagagcaacgggagtgaaggcagcagcagtagcaacatctccaccatgctggtgacacacgagtacacggcagtgaaggaggatgagataaacgtctatcaaggagaggtcgttcaaattctggccagcaaccagcagaacatgtttctggtgttccgagccgccactgaccagtgccccgcagccgagggctggattccgggcttcgtcttgggccatacgagtgcagttatcatggagaaccccgacgggactctcaagaaatcaacatcttggcacacagcactccgtttaaggaagaagtctgagaagaaagataaagacggcaaaagggatggcaagttggagaatgggtacaggaagccacgagaagggctcagtaacaaggtatctgtgaagcttcttaaccccaactacatttatgacgttcccccagaatttgttatcccattgagtgaggtcacgtgcgagacaggggagaccgttgtttttagatgtcgtgtctgtggccgccccaaggcctcaatcacctggaagggccccgaacacaacactttgaacaacgatgaccactacagcatctcctacagtgacattggggaggccactctgaagatcattggtgtaagcacagaagatgatggcatctacacctgcatcgctgtgaatgacatgggttcagcctcatcttctgccagcctgagggttctaggtccagggagtgatgggatcgtggtgacttggaaggacaacttcgacgccttctacagtgaagtggctgagcttggcaggggcaggtttgctgtagttaagaaatgtgaccagaagggaaccaaacgagcagtggccacaaagtttgtgaacaagaagttgatgaagcgtgaccaggtcactcatgagctcggcatcctgcagaacctgcagcaccccctcctcgtgagccttcttgacaccttcgagacccccaccagttacgtcctggttctggaaatggctgaccaaggtcgcctccttgactgtgtggtccggtggggaagcctcaccgaagggaaggtcagagcgcacctgggggaagttctggaagccgtccgataccttcacaactgcaggatagcacacctggacctaaagcctgagaatatcttggtggatcagagtttggccaagccaaccattaaactggctgactttggagacgctgtccagctcaacaccacctactacatccaccagttgctggggaaccccgagtttgcagccccggaaatcattcttgggaaccctgtctccctgaccgcggacacatggagtgttggggtgctcacctacgtgctgctcagcggcgtgtcccccttcctggatgacagcgtggaagagacctgcctgaatatttgccggctggactttagcttcccagaggactactttcaaggagttagccagaaggccaaagaattcgtgtgcttcctcctacaggaggaccccgccaagcgtccctcggctgcactggccctgcaggaacagtggctgcaggcaggcaacggcagcggcaaaggcacgggcgtcctcgacacgtccagactgacctccttcattgagcggcgcaaacaccagaatgatgttcgacctatccgtagcattaaaaacttcttacagagcaggcttctgcctagagtttgacctatcttgaagttctttctcattctctttcacctgccaatcagctgttaatttgaatttttgaagaggaaaccaaaccaaaactaagtggccggccgccggctgttcatcgtgtgaaatggcattccaagtgagctgtgctcaacagcgcttgggctcagagctgcaaggtgcgctggggtggaggaccttcagttacactctgcatgggcagagaccgcattgctggatcacagtattttattcaggttcctgcaaaaataataataataataataaaaaagagatactttttttaatgaacatggatagaattttgcaaatttaacattttcaagatttattc

SEQ ID NO: 46 - DNA, 10435 bp, Mus musculus
  misc_feature (7606)..(7623): n is a, c, g, or t
  misc_feature (7750)..(7788): n is a, c, g, or t
ggatcttttcggaatgatggtttgaaagcttctgatgtccttcctatcctaaaggagaaagtggcctttgtgtctggggggcgtgacaagcgaggtggacccatcctgaccttccctgcccgaagcaatcatgacagaataagacaggaagacctacggaaacttgtgacgtatttggccagcgtgccaagtgaggacgtttgcaaacgtggcttcaccgtcatcatcgacatgcggggctccaagtgggatctcatcaagcccctcctcaagacgctgcaggaagccttccccgccgagatccatgtggccctcatcatcaagcctgacaacttctggcagaagcagaagaccaactttggcagctccaaattcatctttgagacaagcatggtgtctgtggagggcctcacgaagctggtggacccctcccagctgacagaggagtttgacggctccctggattacaaccatgaggagtggattgagttgcgcctctccctggaggagttcttcaacagtgcggtccacctgctctcacgccttgaggacctgcaggagatgctggcccggaaggagttccctgtggatgtggagggctctcggaggcttatcgacgagcacacgcaacttaagaaaaaggtgctgaaggcccccgtggaagagctggaccgggaggggcagcgtctactgcagtgcatccgctgcagcgatggcttctcagggcgcaactgcatcccaggaagtgccgacttccagagccttgtacccaagatcaccagcctcctggacaagctgcattccacccgacaacacctgcaccaaatgtggcacgtgcgaaagctcaagctggatcagtgcttccagctgcggctcttcgagcaggatgctgagaagatgttcgactggataagccacaacaaggagttatttcttcagagccacacagagatcggagtcagctaccagcatgcactagacctccagacacagcacaatcactttgccatgaactccatgaatgcctatgtcaacatcaaccgcatcatgtctgtcgcttcccgcctctcagaggccggccattatgcctcccagcaaatcaagcagatctccacgcagctagaccaggagtggaagagctttgccgctgccctggatgaacgcagtacaatcctggccatgtctgctgtgttccaccagaaggcagagcagttcctgtcaggcgtggatgcctggtgtaagatgtgcagcgaaggcggccttccttctgagatgcaggacctggagctggcaatccaccatcaccagtccttatatgagcaggtgacccaggcctacacagaggtcagccaggatggcaaagcactactggatgtcctgcagcgtcccctgagtcctgggaactctgagtccctcacagccacagccaactactccaaggcggtccaccaggtgctggatgtggtccacgaggtgctgcaccatcagcgacggctcgagagcatctggcagcaccgcaaggtgcggcttcaccagcggctgcagctgtgtgtcttccagcaggatgtgcagcaggtgctggactggattgaaaaccatggcgaggcctttctcagcaaacacactggggttggcaagtccttgcatcgagcacgtgcactacagaagaggcatgatgactttgaagaagtggcacagaatacatacaccaatgcggacaagctcctagaagcagcggagcagctggctcagactggggaatgtgacccggaggagatctacaaggcagcccggcacctggaggtgcgcatccaagactttgtgcgcagagtggagcagcggaagctgcttctggacatgtcggtctctttccacacgcacaccaaagagctgtggacatggatggaggaccttcagaaggaggtgctggaggatgtctgtgcagactctgtggatgcggtccaggagctgatcaagcagttccagcagcagcagaccgccaccctggatgccactctcaatgtcatcaaggaaggcgaagaccttatccagcagctcaggtcagcgcctccctccctgggggagcccaccgaggccagggactcagcgatgtccaacaacaagacaccccacagtagctctatcagccatattgagtctgtcctccagcagctggacgatgctcaggtacagatggaagagctgtttcacgagcggaagatcaagctggacatcttcctacagctgcgcatctttgaacagtacaccattgaggtcactgcagagctggatgcctggaacgaggacttgctccggcagatgaatgatttcaacacagaggatctgaccctggctgagcagcggctacagcgccacacagaacggaagcttgccatgaacaacatgacgttcgaggtcatccagcagggccaggacctgcaccagtacatcatggaagtgcaagcgtcaggaatcgagttaatctgtgagaaggaccttgacctggcagctcaggtgcaggagctgctggagtttctccatgagaagcagcacgagctggagctcaatgcggagcagacgcacaagcggctagagcagtgtctccagctgaggcacctccaggctgaggtcaaacaggttctgggatggatccgcaatggagagtcgatgctcaacgccagcctggtcaacgccagctctttgtcggaggcagagcagctgcagcgggagcatgaacagttccagctagccatcgagtccctctttcatgccacttccttgcagaagacgcaccagagcgccctgcaggtacagcagaaggcagaggcactgctccaggccggccactacgacgcagacgccatccgggaatgtgctgagaaggtggccctccactggcaacagctcatgctaaagatggaggaccggctgaagcttgtcaacgcctctgtggccttttacaagacctctgagcaggtgtgcagtgttctggagagcttggagcaggagtaccggagagacgaggactggtgtggtgggagagacaagctggggccggcggcagagatggaccacgttattccactcctcagcaagcacctggagcagaaggaggccttcctgaaggcctgcacgctggcaaggcggaacgccgaggtgttcctcaaatacatccacaggaacaatgtgagcatgcctagtgttgccagccacacccgggggcctgaacagcaagtaaaaatcttgagcgagctcttgcagagggagaatcgagtcctgcacttctggaccttgaagaagcggcggttagaccagtgtcagcaatatgtggtgtttgagcgcagtgctaagcaggcactggactggatccaagaaacaggagaatattacctctcaacacatacctccaccggagagaccacggaggagactcaggagctgctgaaagagtatggagaattcagggtgcctgccaagcaaacgaaggagaaggtgaaacttctgatccagctagcagacagctttgtggaaaagggccacatccacgccacagagatacggaaatgggtgaccacggtggacaagcactaccgcgatttctccctgaggatggggaagtaccggtactcgctggagaaggcgctgggggtcaacacggaggataacaaggacctagagctggacatcatcccagcaagcctttcggatcgggaggtcaagctccgggacgctaaccatgagatcaatgaagagaaacggaagtcagctcgaaagaaagagttcattatggctgaactgctccaaactgagaaggcttatgtaagggacttgcacgagtgcttggagacctacctgtgggagatgactagtggtgtggaagagataccccccggcatcctcaataaggaacatatcatcttcggcaacatccaggagatctatgacttccataacatcttcctcaaagagctggagaagtacgagcagctgcctgaggatgtgggacactgctttgttacctgggcagacaaatttcagatgtatgtcacctactgtaaaaacaagcctgattccaaccagctgatcctggagcatgcgggcaccttctttgatgagatccagcagcggcatggcctggccaactccatctcctcctacctaattaagcctgtccagagggttaccaagtaccagctgctcctgaaggaacttctaacttgctgtgaagaagggaaaggagagctgaaggatggcctggaggtgatgctcagtgtccccaagaaagccaacgatgccatgcatgtcagcatgctggaagggttcgatgaaaacttggatgtacagggggagttgattctccaggatgcctttcaagtgtgggacccaaagtcgctgatccggaaggggcgggagcgccatctgttcctctttgagatctccttggtgtttagcaaagagatcaaagactcttcaggacacacgaaatatgtttacaagaacaagctactgacctcagagctgggtgtgaccgagcatgtagaaggtgacccctgcaaattcgccttgtggtctgggcgcaccccatcctcagacaataaaacagtgctcaaagcttccaacatcgaaaccaagcaggaatggatcaagaacattcgagaagtgattcaggagaggatcattcatcttaaaggcgctttaaaggagccaattcagctccccaaaacaccagccaaactgaggaacaatagtaagagggatggggtagaggatggtgacagccaaggggatgggagcagccagccagataccatatccattgcctccaggacctctcagaacacagtggaaagtgacaagctctcaggtggatgtgagctgaccgtggtcctccaggacttcagcgcaggccacagcagcgagctgagcatccaggtgggccagacggtggagctgctggaacgaccgagtgagaggcctggctggtgtctggtccgcaccacagagcggagccccccacaggaaggcctggtacccagcagcgccctgtgcatctcacactctcgcagcagcgtggaaatggactgcttcttccccttgaaagattcatactctcattcctccagtgagaatggaggcaaatccgagtccgtggcccacctgcagtctcagccctccctgaactccatccacagttcccctggtcccaagcgctccaccaacaccctcaaaaagtggctgaccagccccgtgcgccgcctcaacagcggaaaagccgacgggaacatcaaaaagcagaagaaagtccgggatgggcggaagagcttcgatctgggatcgcccaagcctggggatgagacgacacctcagggagacagcgctgacgagaagagcaagaagggttggggcgaagacgagccagatgaagagtcacacacacccctccctccgcccatgaagatctttgacaacgaccccacacaggatgagatgtcgtctttgctagcagcccggcaggctccccctgacgtgcctactgctgcagaccttgtcagtgcaatagaaaagttggtcaaaaataagctgactctggaaggaggctcttaccgggggagcttgaaggaccctacaggctgcctgaatgaggggatgacccctcccacacctcctagaaacctggaagaagaacagaaagccaaggcgctgagaggcaggatgtttgtcctgaatgagctggtacagacagagaaggactacgtcaaggacctggggattgtggtggagggcttcatgaagagaatagaagagaagggggtccctgaggacatgcgagggaaggaaaagatcgtgtttggaaatatccaccagatttacgactggcataaagattttttcctggctgaactggaaaaatgtatccaagagcaagacagattggcccagctcttcattaaacacgagcggaagctgcacatctacgtgtggtactgccagaacaagccgcgttccgagtacatcgtggctgagtacgatgcctattttgaggaggttaaacaagagatcaatcaaaggctgacccttagtgacttcctgatcaagcccattcagagaataacaaagtaccagctgctactcaaggacttcctgcgatacagcgagaaggctggtttggagtgttccgatattgagaaagcagtggagttaatgtgccttgtccccaagcgctgtaatgacatgatgaatctgggacgcctgcagggcttcgagggcaccctgaccgcccagggcaagctactgcagcaggacacattctatgtgatcgagctggatgccggcatgcagtcccggaccaaggagaggcgtgtgtttctctttgagcagattgtcatcttcagtgaactgctccgaaaggggtccctcaccccaggctacatgttcaaaagaagcatcaagatgaattacttggtcctggaagacaatgtggatggtgacccctgcaaatttgcactcatgaacagggagacttcagaaagggtcattctacaggctgccaactcagacatccagcaggcctgggtgcaggacatcaaccaagtcctagaaacacagagggacttcttaaatgcactacagtcacccattgagtatcagcggaaggagagaagcacagctgtgatccggtcccagcccccgagggttccacaagccagccccaggccctactcttctggcccggtgggctcagagaagccccccaagggctccagctataacccgcctctgccacccctgaagatatctacctctaatggcagtccagggttcgactaccatcagcctggggacaagtttgacgctagcaagaacgacctgggaggctgcaatgggacatcaaccatgactgtaatcaaagattactatgcactgaaggagaatgaaatctgcgtgagccaaggtgaggtggtacaggtcctcgccgtcaaccagcagaacatgtgtctggtgtaccagcctgccagcgaccattccccggcagcagagggctgggtcccaggcagcatcctggcgcccctcgccaaagccacagcagcggccgaaagtagtgacgggagcatcaagaagtcatgctcttggcacactctacgcatgagaaagcgggcagacgtggagaactcgggtaaaaatgaagccacagggcctcgtaaacccaaggatattctgggcaacaaagtctctgttaaagagacgaacagttccgaggagtcagagtgtgatgatcttgaccctaatactagtatggaggtattgaatccaaatttcatccaggaagtggctccagaattcctcgtgcccttagtagatgtgacctgtttgcttggagacacagtgctactgcagtgtaaagcctgtgggcggccaaagcccagcatcacctggaagggtccggatcagaacatcctagacactgacaacagttcagcaacatacaccatctcctcctgtgattctggggaaagcaccctcaagatctgcaacctgatgccccaggatagtgggatttatacctgcctagcagcaaacgaccacgggactgcatccacatctgccnnnnnnnnnnnnnnnnnngtccccgcagcccccaaccgcccaatcgcacaggagaggagctgcacctccgtcatcctccgctggctgcccccagccagcaccggaaactgcactatttcggggtacacagtggagtatcgcgagnnnnnnnnnnnnnnnnnnnnnnnnnnnnnnnnnnnnnnncttggaacttacctggttcttgaagaccttagtcctgggtgcccttatcagttcagggtcagtgccagcaacccctggggaatcagccttcccagtgagccctcggagtttgtgcgccttccagagtacgatgcagccgccgacggtgccaccatttcttggaaggaaaattttgattctgcttacactgaactgaacgagattggcagaggccgtttctctattgtaaagaaatgcattcacaaagctacccgcaaagatgttgctgtgaaatttgtgagcaaaaaaatgaagaagaaggagcaggctgctcacgaggccgccctgctccagcacctgcagcaccctcagtatgtcacgctccatgacacctacgagtcccccacatcctacatcctgattttggaactgatggatgacggccgactcttggactaccttatgaatcatgatgagctgatggaagaaaaggtagctttctacattcgagacatcatggaagctctgcagtacctgcacaactgtagggtcgcacatttggacataaagcccgaaaacctgctcattgacctccggatcccagtgcctcgagtgaagctcatcgacttggaagacgctgtccagatctcaggccacttccatatccaccatctgctggggaaccctgagttcgctgcccccgaagtgatccaaggcatccctgtctccctgggcacagacatctggagcatcggggttctgacatatgtcatgcttagtggggtctcccccttcttagatgagagcaaagaggaaacctgtatcaacgtgtgcagggtggactttagcttcccccacgagtacttctgcggtgtgagcaatgctgccagggatttcatcaacgtaatcttacaggaagacttccggaggcggcccacagcagccacgtgcctgcagcatccctggctacagccccacaacggcagctactccaagatccccttggacacctcccgtctggcctgcttcatagaacgccgcaagcaccagaatgatgtgcggcccattcccaatgtcaagagttacatcgtcaatagggtgaaccaagggacctcgctatcccacaacccctgaggtttcacatagtagtgcagtgtgaaccaaagcaagactgagcgtgtctgtaaataactctgatcatcatttcactccatgtggttctctggactgacaggtgatcctcttaaaccttgtctgtggttacccggggtctgagtaccatgaaagtcaccttaatcccagaaggtcatgctgaagaagtaaagatacagagttgcagaaagtattaaaagaaagggcaaggctaaggagacagtacttggtatgaaaatggtaattgtacattccaaaatgagcagttaagtgggaaaaccgtacacccactgtgagcagtatggtaggtttctgactccattgaaaatttaagcaaaaacaaaaaaacaaaaaaaacaaaaacaaaaaaaagttctatttaacagagatgtcaactattctgctttagatggcttagatatagtttcttaacaggatacatatacgcatacaatataatagatctcattcaggtttcagagttttataatatagagttctatatgaaatctatcataagtaactttgagtgctcccattaagacagtaatttctttaccgaagcattgcattattttgactaagcacaattagatgacaagttttttagagcattttataaatcttgtatagaaatcttttatcagaacctgtgtattaagagaaagcaatgtgacccttttgcgatctgtgactgggatatttttccctccatcatgggttgtatgactaagataggttctgtagatcaaagctttccctgccctgaactcatgggcagctcagagttcctcctgtgggaaagactgccaggaaataaatccaaatctagtaagagttggcgggtgggggttgtttttatgtccaccctaggcctgccataggcaaatgaatatcacaagttcatacaggagggcacacggaagcttttcctacagttcctgtgaacagcgtagcagcgctttctgatttcatagctgtagaatacagttttcagaaagttagcttgctttattcctaacccctcgtgaagcttcggggtgcttaccaaaaggaggcagccataaaagccttttaaaggctagtcctaagtccttcctgaagccatggagcaaagcctgacccatcactctaacacagcacggggttttaactgtggtagcaatacctatcaccacacagccaccaacggctctggacagaaaggaccaattgtattctgaggccagtgccgctttctcatacaagattatgcccagtgccctctggagggaaaacacattaaccagggcacttcatgtttttttgttttgttatgttttgttggttttttggtttttacttcttctgttggaaggggggtgggggaggtttggttttttgctttgtttttttaaaaattattttctgtttgtacatgatccaccctttgtttcctagagtgtgctttaaaaatcgctttgaagcaaataatattcttaaaaaatatataactgaaatgtttgtgttaaaaaaa

SEQ ID NO: 47 - DNA, 10803 bp, Mus musculus
acaggccgaaagcgggcgggcagcaggaaggcccgccgccggccccataggactcatctcttaaggcaccataccccctagggcgtccccctggcctcccaattctagcgtcccctgcccctctagtccagctcgcagaggccatgcagaaagcccggggcacgcgaggcgaggacgccggcacgagggcacctcctagccccggggtgcccccgaagagagccaaggtgggggccggcagaggggtcctcgtcaccggggatggggccggggcgccggtcttcctgcggcccctgaagaacgcggcggtgtgtgcgggcagtgatgtaaggctgcgggtagtagtgagcgggacaccccagcctagcctcagctggttccgggatgggcagctcctgcctccaccggccccagagcccagctgcctgtggctgcggagctgcggggctcaggacgccggcgtgtacagctgcagcgcccagaatgagcggggccaggcctcctgtgaggcagtgctcacagtgctggaggtcagagactcggagactgccgaggatgacatcagcgatgtgccggggacccagcgcctggagcttcgggatgacagggccttcagcacccccacggggggctctgataccctggtgggtacctccctggacacacccccgacctccgtgacaggcacctcagaggagcaagtgagctggtggggcagcgggcagacggtcctggagcaggaagcgggcagcgggggtggcacccgccccctcccaggcagcccaaggcaagcacagacaaccggggccgggccacggcacctgggggtggagccgctggtgcgggcatcgcgagctaatctggtgggcgcaagctgggggtcagaggatagcctttcggtggccagtgacctctatggcagcgcgttcagtctgtacagaggacgggcgctctcgatccacgtcagcattcctccgagtggattgcacagagaggagcctgaccttcagcctcagccagccagtgatgcccttcgtccacgccctgcccttccacctccctccaaatccgctttgcttcccccaccatctcctcgggtgggaaagagggctctgccaggacctagtacccagcccccagctactcccacttcgccccatcggcgtgctcaggagccctcgctgcctgaggacatcaccaccacggaagagaagcgagggaaaaagcccaagtcatccgggccgtcgctggcgggcacagtggagtcccggccccagacgccactgagcgaggcttcgggtcgcctgtcagcattgggccgctcgccccggctggtgcgcgcggggtcccgcatcctggacaagctacagttcttcgaagagcggcgacgcagcctggagcgcagcgactcgccgccagcgcccctgcggccctgggtgcccctgcgcaaggctcgctcgctggagcagccgaagtccgagggcggtgcggcgtggggcacacccgaggcctcgcaggaggagctgcggtcacctcggggcagtgtggcagagcggcgtcgcctgttccagcaaaaggcggcctcgttggatgaacgcacgcgacaacgcagtgcaacctcggacctcgaactccgcttcgcccaggagctgggtcgcatccgccgatctacgtcgcgggaggagctggtgcgttcgcacgagtccctgcgtgccacgctgcagcgcgccccatcccctcgggagcccggcgagcccccactcttctcccggccttccacacccaagacctcacgggctgtgagcccggctgccacccagccgccgcctcctagtggtgcgggcaaatctggggacgagcctgggaggccccgaagcagagggccggtgggcaggactgaaccgggggaaggcccgcagcaggagatcaagcgtcgggaccaattcccgctaaccaggagcagagccatccaggagtgcaggagccctgtgccgccctacaccgcggatcccccggagagcaggacaaaagccccctccggtcgcaagcgggaaccccctgctcaagcggtgcgctttctgccctgggccactccgggagtggaggactctgttctgccccaaaccttggagaagaatagagcgggacccgaggctgagaagaggcttcgcagaggacctgaggaggatggcccctgggggccctgggaccgcagagggacccgcagccaaggcaaaggtcgccgtgctcggcctacttcccccgagctcgagtcctcagacgactcctatgtgtccgctggggaagagcccctggaggcacccgtgtttgagatccctctgcagaatatggtggtggcgccaggagctgacgtgctacttaagtgtatcatcaccgccaaccccccaccccaagtgtcctggaaaaaggatgggtccatgttgcacagcgagggtcgtcttctcatccgggctgaaggtgaacggcacacactgctgctcagagaggcccaggctgccgatgctgggagctacacagccactgccaccaacgaactgggccaagctacctgtgcttcttcactggctgtgagacctggcggctccacatcccctttcagcagccccatcacctctgatgaggagtacctgagccccccagaggagttcccagagcctggggagacctggccccgaacccctaccatgaagctcagtcccagccaggatcatgattcctccgactcttcttccaaggcacccccaacgttcaaggtctcactcatggaccaatcggtgagagaaggtcaagatgtcattatgagcatccgtgtgcagggagagcccaagcctgtggtttcctggctgaggaatcgacagcccgtgcgcccagaccagcggcgctttgcagaggaggccgagggtgggctctgccgcttgaggatcctggctgctgaacggggcgatgctggtttctacacatgcaaggcggtcaacgaatatggcgctcggcagtgcgaggcccgcctggaggtccgagcacaccctgaaagccggtccctggccgtgctggcccccctgcaggacgtggacgtgggggccggggagatggcgctgtttgagtgcctggtggcaggtccagctgacgtcgaggtggactggctgtgccggggccgcctgctgcagcctgcgctgctcaaatgcaagatgcattttgatggccgcaagtgcaagctgctgctcacctctgtgcacgaggacgacagtggtgtctacacctgcaagctgagcacagccaaagatgaactgacctgcagtgcccggctgacggttcggccgtcgctggcgcctctcttcacccggttgctggaagatgtggaggtgttggaaggccgtgctgcccgcttggattgcaagatcagcggtaccccgcctccctccgttacctggactcattttggccaccccgtgaatgagggtgacaacttgcggcttcgacaggatggaggtctacactcactgcacattgcccgggtgggcagtgaggacgaaggactctatgaagtcagtgccaccaacactcatggccaggcccactgctccgcccagctgtatgtggaggagcctcggacagctgcctctggccccagctcgaagctggagaagatgccatctatccctgaggagccggagcacggagatctagagaggctgtctattcctgacttcctacggccactgcaagatctggaagtgggactagctaaggaggccatgctggagtgccaagtgaccggcctgccctatcccaccatcagctggttccacaatggccaccgcattcaaagcagtgacgaccgacgcatgacacagtacagggacatacatcgcctggtgttcccagctgtggggcctcagcatgctggtgtctataagagtgtaatcgccaacaagctgggcaaagcggcctgctacgcccatctctatgtcacagatgtggttccaggccctccagatggtgctccggaagtagtagctgtgaccggaaggatggtcacactatcgtggaacccacccaggagtctggacatggctattgacccagattccctaacatacactgtgcagcaccaggtgttgggctcggaccagtggacggcactggtcacaggcctgcgggagcctgcgtgggcagccacagggctgaagaaggggatccagcacatcttccgggtcctcagctccagtggcaagagcagcagcaagccctcagcaccgtcggaacccgtgcagctgctagagcatggcccacccctggaagaggcgcctgctgtgctggacaagcaggacattgtgtatgtggtagagggccagcctgcctgtgtcaccgtcacttttaaccatgtggaggcccaggttgtctggaggagctgccggggagccctcctcgaggcgcgcacaggtgtgtatgaactgagtcagccagatgacgaccagtattgtctgcggatctgccgggtgagccgacgagacctgggaccccttacttgcagtgcccgaaaccgccacggcacaaaggcctgctcggtcaccctggagctggcagaggcacctcggtttgagtctatcatggaagatgtggaggtggggcctggagaaaccgctcgctttgctgtggtagttgaggggaaaccactgccagacatcatgtggtacaaggatgaggtgctgctggccgagagcaaccatgtgagcttcgtgtatgaggagaacgagtgttccctagtgctgctcagcgcaggaagccaggatggaggcgtctatacctgtaccgcccggaacctggcaggcgaagtctcctgcaaggcggagctgtctgtgctttcagctcagacagccatggaggtcgagggggtcggagaggatgaggaacaccgaggaagaagacttagcgactactacgacatccaccaagagattggcaggggtgccttctcctacctgcggcgtgtagtggagaggagctctggcctggagtttgcagccaagttcatccctagccaggctaagcctaaagcatcagcaagacgcgaggcgcgcttgctggcccggctccagcatggctgtgtgctctacttccacgaagcctttgagaggcgcaggggacttgtcatagtcacggagctctgcacagaagagcttctagagcgcatggccaggaagcccaccgtgtgtgagtctgagactcggacctatatgcgtcaagtgctagaggggatatgctatctgcatcagagccatgtgctgcacctggatgtcaagccggagaacctgcttgtgtgggatggtgcagggggtgaagagcaggtgcgcatctgtgacttcgggaacgcccaggaactcactccgggagagccccagtactgtcagtatggcacgccagagtttgtagcacctgagattgtcaaccagagccctgtgtctggagtcactgacatctggcccgtgggcgtcgttgcctttctctgtttgacgggcatctccccatttgttggggagaatgaccggacaacactcatgaatatccgaaactacaacgtggcatttgaggagactacgttcctgagtctgagcagggaggcccggggcttcctcatcaaagtgctggtgcaggatcgactgagacctactgcagaagagacattggaacatccttggttcaaaacagaagcaaagggtgcagaggtgagcacagatcacctgaagctcttcctgtcacggaggaggtggcagcgctctcaaatcagctacaagtgccacctggtgctgcgccccattccggaactgctacgggctcccccggagcgggtgtgggtggccatgcctagaagacaacccccgagtgggggactctcatcctcttcagactcagaagaggaagagttggaggaacttccctcagtaccccgccccctgcagcctgagttctcaggttctcgggtatccctcaccgacatccccaccgaagatgaggctctggggaccccggaagctggggctgccacccccatggactggcaagagcaggaaaggactccctctaaggaccaggaggcccccagccctgaggcactcccctctccaggccaggagtcccctgatgggcctagccccaggcggccagagctccgcaggggtagctctgctgagagtgccctgccccgagtcgggtcgcgggaaccgggccggagcttgcacaaggcagcatccgtggagctgccgcagcgcaggagccccagcccgggtgccacccgcctgactcggggaggcctgggtgagggcgagtatgcccagaggctgcaggccctgcgtcagcggctgctgaggggaggccccgaggatggcaaggtcagcggcctcaggggacccctgctggagagcctggggggccgtgcacgggatcccaggatggcaagggctgcctccagcgaggctgccccccaccaccagccccctccggagtcccggggtctgcaaaagagcagcagcttctctcagggcgaggcagagccccggggtcggcaccgccgcgcgggggcacccctcgaaatccccgtggccagacttggggctcgcaggctgcaggagtctccctccttatctgcccttagcgagacccagccaccgagccctgcgaggcccagcgtccccaaactcagtatcaccaagtccccggaaccttccgctgtcacatccagagactctccccagcccccggaacctcagcctgtcccagaaaaggtccctgagcccaaaccagaaccagtccgagctgcaaaaccagcacaaccccctttggctctgcaaatgccaacgcagcctctcaccccctatgcccagatcatgcagtcgctccagctgtccagtcccaccctgtccccacaggaccccgctgtgcctccatcagagcccaagccccacgcggctgtgtttgccagggtggcttccccaccacccggagtctctgagaagcgcgtgccttcggccagaactcccccagtgctagccgagaaagcccgagtccccacggtgccccccaggccaggcagcagcctcagcggcagcatcgaaaaccttgaatcagaggctgtgttcgaggctaagttcaaacgcagccgcgaatcgccactgtcgcggggcctgaggctactgagccgctcgcgctcggaggagcgcggtcccttccgtggggcggaggacgacggcatataccggcccagtccggcaggaacgccgctagagctggtgcgacggcccgagcgctcgcgctccgtgcaggacctcagggtagccggagagccgggccttgtgcgtcgcctttcgctgtccctgtcgcagaagctgcggcggacaccgccgggacagcgacaccctgcctgggagtcccgcagcggagacggggagagctccgagggcggcagctcagctcgggcatccccagtgctggcggtacgcaggagactcagctccacgctggagcgtctgtccagccgtttgcagcgcagcggcagcagcgaggactccgggggcgcctcgggtcgcagcacgccgctgtttggacggctgcgcagggctacttcggaaggggagagcctgcgacgcctcggtgttccgcacaatcagctgggctctcagactggtgccactacaccttccgctgagtctctgggctcagaggccagtggcacatcgggttcttcagctcctggagaaagccgaagccggcaccggtggggcctttccaggctgcgcaaggacaagggattatctcagccaaacctctcctccagtgtccaagaggacttgggtcaccagtatgtgcccagtgagtcagatttccccccagtcttccacatcaaactcaaggaccaggtgctgttggagggggaagcagccaccctgctctgcctacccgcagcctgcccagcaccccgcatctcctggatgaaagataagcagtccctgcgttcagagccctcagtggtcattgtgtcctgcaaagatggacggcagctgctgagcataccccgggccggcaagcggcatgctgggctctatgagtgctcagccaccaatgtcctgggcagcattaccagctcctgtactgtggccgtggcccgcattccagggaagctagctcctccagaggtgccccagacctaccatgacacagcactagtagtgtggaagccaggagacggtcgggcaccttgcacatacactctggagcggcgggtggatggggaatctgtctggcaccctgtgagctcaggcatccccgactgttattacaatgtgactcagctgcctgtcggcgtgaccgtgcggttccgtgtggcctgttccaatcgtgctgggcaggggcccttcagcaacccttctgagaaggtcttcatccgaggcactccagattctcctgctcagccagctgctgctccccgagatgcccctgttacctcagggccaaccagggccccaccgcctgactctcctacctcactggcccccacccccgctcttgcgcccccagcctcccaggcatccactctcagcccctcaacttcctccatgtctgccaaccaggccttgtcctcactcaaggctgtgggtccaccacccgcaacccctccacgaaagcacaggggccttctggccacccagcaagcagagccatccccacccagtatcgtggtcaccccaagtgaacccaggtcttttgtccctgacactggaaccctgaccccaacctctagtcctcaaggggttaaaccagcaccttcctcaacttccttgtatatggtgacttccttcgtgtctgcacctccagccccccaggccccagcccctgagccccctcctgagcccaccaaggtgactgtgcggagcctcagcccagccaaggaggtggtcagctccccaactcctgagagcaccactcttcggcagggtccccctcagaaaccctacaccttcctggaggagaaggccaggggccgctttggcgttgtgcggtcatgccgggagaatgctacgggccgaacgtttgtcgccaagatcgtgccgtacgccgcggagggcaagcgacgcgtgctgcaggaatacgaggtgcttcggacgctgcaccacgagcggctcatgtccctgcacgaggcctacatcacccctcggtacctcgtgcttatcgctgagagctgtggcaaccgggaactcctctgtgggctcagcgacagattccggtattcagaagatgacgtggccacctatgtggtgcagctgctacaaggcctggactacctccacggccaccacgtgctacacctggacatcaagccggacaatctactgttggccgctgacaatgcccttaaaattgtggacttcggcagtgctcagccctataaccctcaggccctgaagccacttggccaccgcacaggcactctggagttcatggctcctgagatggtgaagggagaccccattggctctgccacggacatctggggagcgggtgtgctcacctacatcatgcttagtgggtactccccattctatgagccagacccccaggaaacagaggctcggattgttgggggtcgctttgatgccttccagttgtatcctaacacatcccagagtgccaccctcttcttgagaaaggtcctctcagtacatccctggagccggccctctctgcaggactgcttggcccacccatggctgcaagatgcctacctgatgaagctgcgccgccagacactcaccttcaccaccaaccggctcaaggaattcctgggcgagcagcggcgacgtcgggctgaggctgctacccgtcacaaggtgctgctccgctcctaccctggcagcccctaggtggcacagaccgcagcccggccacgggcttcaacttgggttctcactcgcgctgccaagggacattccagagcccatgctgagctggacaggcaggggcttcagataccagcagcagcagcagcagcagcagcagcaacatctggctgggctattacctcatggacctaagaggacaaggccctggggcttcagccgaatgtcaccccggccataaccagagcaggagacccactggccaggctgggcaagggtgagagcagaaagaggcaaagagggagttgggaagtgaagaatgagacggaggatagagagggaggagtttgaggaaggttctaggctggagtggaatgctatatctcagggagaagccagaaggggacatggctgaagaggaagaaggaccctgtgatgtgggaatgtggtggagaggaggactggacatagagagtgtgccaggagccagagcagagacataagggagggcagaagggtagaaggcaacaggagtgggctcaggggtggcagggcaggccagcagctgcatcttcagaaagagagaggagaaaggcaaagagacgaaaggccgctccagctggtctcctgtcccagccgatgcagttctgggcgttctccactggcccagggatgtcctcactgctcctccatggcctttgccctccttcccatttgtatttatttatttattgccttttgtggagtttcctttctatccagtccctagtgcctatgttgtcccgaccatcccccttcagtcacccagctgtctgtgcagctgtctgtctgtctgtcacaaggaaaataaaacaaaacaaaacaaaacaaaacaaacaaaaaaaaaaaaaaaaaa

SEQ ID NO: 48 - DNA, 25569 bp, Mus musculus
  misc_feature (6082)..(6084): n is a, c, g, or t
  misc_feature (6193)..(6194): n is a, c, g, or t
  misc_feature (10966)..(10971): n is a, c, g, or t
ttcagcggagcaccccgcttcctgacgcggccaaaggcctttgtggtatctgttggcaaggatgccacgctgagctgccagatcgtgggcaaccccacgccacacgtgagctgggagaaggaccggcagccagtagaggcaggagcgcgcttccgcctggcccaggacggggatgtgtaccgcctcacaattctcgatctggcgctaggtgacagcgggcagtatgtgtgtcgcgcgaggaacgccataggggaggccttcgccgccgtcggcctgcgagtggactcggagggcacgtgtgccgagcaggcgccccactttctgctgcggcccacatccattcgcgtgcgcgagggcgcagacgccaccttccgatgtcgcgttggaggctcaccacaacctgctgtgagctggtccaaagatgggcggcgcctgggcccacccgatgccccccatgtgcgtgtggaagaacacggggagtcgagcgcgcttcgcatccgttcggcaaggcctcgcgatggtggcacctacgaagtccgagcagaaaatccgctgggctctgccagcgctgccgccgctctggtggtggactcggacgccgaggttgccggaccacccggcacctccaccgccacgctcctggcgcacctgcagcagcggcgggaggccatgcgcgcagagggcatacccccttctccacccggcgctggcacgcgcacctgcacggtgaccgaaggcaaacacgcgcgcctcagctgttttgtgaccggcgagcccaagcccgagacagtgtggaagaaggacgggcagctggtgaccgagggccggcgacacgtagtgtatgaggacgagcaagagaacttcgtccttaagattcttttctgcaagcagtccgaccgcggcctctacacctgcacagcgtccaacctcgtgggccagacctacagctcggtgctggtggtcgtgagagagccgacggtgcccttcaagaagcggctgcaggacctggaggtacgagagaaagagtctgctacattccagtgcgaggtggctcagccagctaccgaggcggcgtggttcaaggaggagacccggctatgggccagcgccaagtacgacatcgaggaggagggcaccgagcgccggctgaccgtgcgcaacgtctcggcagacgacgacgctgtgtacatctgcgagaccacagagggcagccgcacggtggcagagctctctgttcaaggcaggcgaaacttgaccagaaagctgcctcggaagacagcagtgcgcactggagacacagccatcttttgggtggagctggctgtccccgaaggccctgtccggtggctacggaaccaggaggagatggtggcagggggtcgggttgccatcactgcagaaggcacgtgccacacactgaccatcttccagtgcaccttggaggacatgggtgaggtggcctttgtgtctggtggatgccggacgaccacccagttctgtgtatcagcgcccaggaggccacccctgtaccctcctgctgaccctgttgtaaaggccaagacagagagttctgtgaccctcagctggtccgcaccaccccatggggaccgccctgtcactattgatggctatgtgttggagaagaggaagctgggtgcctatgcctggagcaggtgtcacgaagctggatggctggccacaactgagtttaccatcactggtgtggctgaggagggggatttccagttccgagtgtcagccatcaatcactttggccagggtccttaccttgaatttccagggaccatgcacttggtccccatgctggctgtaaagacacctctgaaggcggtggaggcagtggagggtggtgaggtcactttctccgtggacctcacggtggcctcttcgggcgaatggttcctggatggggaggccttgaaagcgagcagtatatacgtgatccgttgtgaccgcacccggcatatgctcaccatcagagaggtgcccgccagattgcatggggcacagctgaagtttgtggctaatggcattgaaactagcatccaaatggtggtccgagcggctctggggctgcccagcagtaagcttcctgctgcggctgcccgggaggtgctggcccagttgcacgaggaggcacagctgctggctgagctgtcggaccaggctgctgctgtgacttggctgaaggatggtcgtgagctgtccctagggcccaagtatgagatgcaggtgtcagctgggaggcgagcactgctggtgcgggacgtggcacaggatgacgctggcctctatgagtgtgtcagtcgtgggagccgcactgcctaccagctgttggtgcaagagcccaagctgatgtttgccaaggagcagcaggcacacagcgaggtgaaggcagaggctggggccagcgccacactgagctgcgaggtggcccaggcccagactgaggtgacatggttcaaggacgggaagaagctgagctccagctcgaaggtgcgcgtggaggcctcgggctgctccaggaggctggtggtgcagcaggcgggcaaggcggatgctggggagtacagctgcgaggccggggggcagaagctctccttccgcctggatgtggcagaacccaagctggtgtttgccaaggagcagcaggcacgaagtgaggtgaaggcagaggcagggaacagtgccacactgagctgtgaggtggcccaggcacagactgaggtgacatggttcaaggacgggaagaagctgagctccagctcaaaggtgcgcatggaggcctcgggctgctccaggaggctggtggtgcagcaggcgggcaaggcggatgctggggagtacagctgcgaggccgggggacagaagctctcattccatctggacgtcacagaacccaagctggtgtttgccaaggagcagcaggcacacagtgaggtgaaggcagaggcgggggccagtgccaccctgagctgcgaggtggcccaggcccagactgaggtgacatggttcaaggacggaaagaagctgagctccagctcaaaggtgcgcatggaggcctcgggctgctccaggaggctggtggtgcagcaggcgggcaaggcggatgctggggagtacagctgcgaggccgagggacagaagctctccttccgcctggacgtggcagagcccaagatggtgtttgccaaggagcagcaggcacgcagcgaggtgaaggccgaggcgggggccagcgccacactgagctgcgaggtggcccaggctcagactgaggtgacatggttcaaggacgggaagaagctgagctccagctcgaaggtgcgcatggaggcctcgggctgctccaggaggctggtggtgcagcaggcgggcaaggcagatgctggggagtacagctgcgaggccgggggacagaagctctccttccgcctggacgtcacagagcccaagctggtgtttgccaaggagcagcaggcacgcagtgaggtgaaggcagaggtggggaacagtgccacactgagctgcgaggtggcccaggcccagactgaggtgacatggttcaaggacgggaagaagctgagctccagctcgaaggtgcgcatggaggcctcgggctgctccaggaggctggtggtgcagcaggcgggcaaggcggatgctggggagtacagctgcgaggccggggggcagaaactctccttccgcctggacgtggcagagcccaagctggcgtttgccaaggagcagcaggcacacagcgaggtgaaggcagaggcgggggccagcgccacactgagctgtgaggtggcccaggcccagactgaggtgacatggttcaaggacgggaagaagctgagctccagctcgaaggtgcgcgtggaggcctcgggctgctccaggaggctggtggtgcagcaggcgggcaaggcggatgctggggagtacagctgcgaggccgggggtcagaagctctccttccgcctggacgtggcagagcctaagctggcgtttgccaaggaacagcaggcacacagcgaggtgaaggcagaggcgggggccagtgccacactgagctgcgaggtggcccaggcccagactgaggtgacatggttcaaggacgggaagaagctgagctccagctcgaaggtgcgcgtggaggcctcgggctgctccaggaggctggtggtgcagcaggcgggcaaggcggatgctggggagtacagctgcgaggccgggggacagaagctcttcttccgcctggatgtggcagagcccaagctgatgtttgccaaggagcagcaggcacacagcgaggtgaaggcagaggctggggccagcgccacactgagctgcgaggtggcccaggcccagactgaggtgacatggttcaaggacgggaagaagctgagctccagctcgaaggtgcgcgtggaggcctcgggctgctccaggaggctggtggtgcagcaggcgggcaaggcggatgctggggagtacagctgcgaggccggggggcagaagctctccttccgcctggatgtggcagagcccaagctggtgtttgccaaggagcagcaggcacacagtgaggtgaaggccgaggcgggggccagcgccaccctgagctgcgaggtggcccaggcccagactgaggtgacatggttcaaggacgggaagaagctgagctccagctcgaaggtgcgcgtggaggcctcgggctgctccaggaggctggtggtgcagcaggcgggcaaggcggatgctggggagtacagctgcgaggccggggggcagaagctttccttccgcctggacgtggcagagcccaagctggcgtttgccaaggagcagcaggcacacagcgaagtgaaggcagaggcgggggccagcgccacactgagctgcgaggtggcccaggcccagactgaggtgacatggttcaaggatgggaagaagctgagctccagctcgaaggtgcgcgtggaggcctcgggctgctccaggaggctggtggtgcagcaggcgggcaaggcggatgctggggagtacagctgcgaggccgggggacagaagctctcattccgcctggacgtggcagaaccagaggccgaatcccagattccggagagacccagccgcagggaacctctggttgtcaaggaacatgagaccattatcctgactgccacaatagctgcaccctctgtggctgctgtgacctggctcaaagatggagtggagatccgccgcagtaagcggcatgaggccaccagtctgggtgatacccataccctgaccgtgagaggcgcacaggtcctggacagtgccatctacagctgccgtgttggcaaggaaggtcaggacttcccggtgcaggtagaagaggtggccgccaagttctccaaacccctggagcccgtcgaaggggagctgggtggcaccgtgatgctggtttgtgagctgagcccggagcaggctgaggttgtgtggcgctgtgggaacacacagctgcggccaggcaagcgcttccagatgacatcagaggggcctaggcgcacgctgaccgtgtctggccttcgagaggatgacgcagaggagtatgtgtgtgagagccgggatgaccgcaccagcgcacggctcactgttaaagttccccgagtggtcaagtttacgtctggattgagtgccatggtcgcagaggagggccaagaggccacctttcagtgtgtcgtgtcccccagcgatgcaggggtcacatggtacaaggacgggatgcagctgcagcctagcgagaagtttgttatggtagagagtggggccagccgcagcttgactatcttgggcctgaccctggaggatgccggtcaagtcacagtggaggctgagggggcttcatcttctgctgccctccgggtccgagaggcaccggtcctcttcaaaaagaagctggagccacagacagtggaggagaggacctctgtgacattggaggtggagctgacgcggccctggcccgaggtgaagtggacacggaatgctgccgtcctgaccccannngagaacgtggagatccgcgctgagggtgctcggcactgtctggtgctgcgcagcgtgggctttgctgaccgcggcttctttggctgtgagacaccagatgataagactnnagcccctctgacagtgcggcaggtccggctggttcgcggtctgcaggaggtggaggctaaggaacagggcacggcctcgatggatgtggagctgtcccatgccgaggtggagggcagctggacccgagatggcctgcgacttcagcctggacccaaatgccacctggccgtacaaggccctgtccacatcctcacactctcggcgctgcagccacaggacagtgggctggtggccttcagggccgagggcgtgcacacgtctgcgaggctcatagtcactgagttgcccgtgagcttcaccagagtactacaggatgtggtggccacgcagaaggagaaggtcaccctggagtgtgagctgtcgaggcctgtggatgtgcgctggctgaaggatggtgtggagctgcgggcaggcaaggccataggcatagtggcccagggaacctgcaggagtctcgttatctaccgctgtgagactggggaccagggtgtctatgtatgtgatgctcttgatgctcagacctctgcctctctgagggtgcaaggtcgcagtgttcagattacgaagccgctggaggatgtggaggtaatggagaaggagggtgctacattctcctgtgaggtatcccacgacgaggttcccggcctgtggttccgagaatccagtaagctacggcccagtgacaacgtgcgcatccggcaggaagggaggacatacacgcttatcttccggagggtactggcagaggatgcaggggaggtcaagtttgtagctgagaacgcagaatcaagagctcacctccgagtgaaagaactgcccgtgaccctcctgcgcccactgagggacaagattgccatggaaaaacaccgtggagtgctggagtgccaggtgtcccgggctagtgcccaggtgcggtggttcaagggcggagtcgagctgcagtctgggcccaagtacgaggtggtcagtgacggcctttaccgcaagctggtcattaatgacgtgcagcctgaggatgaagatacgtacacctgtgacgctggcaacgtcaagaccagtgcccagttctttgtggaagagcaatccatcactattgtgcggggactgaaggacatgacagtgatggagcctgcccctgcctggtttgaatgtgagacatccatcccttccgtgaggccacccaagtggctccttggtaagactgtgctccaggcaggggggaacgtgggactggagcaagacggcaccgtgcaccggctgacactgcacaagacctgctctaccatgaccgggcctgtgcacttcactatcggcaagtcccgctcctctgcccagctggttgtctcagacattcctgtggtactgacacggcctctggagcccaaagcagggcgtgaactgcagtcagtagtcctgtcctgtgacttcaggccagcccccaaggctgtgcagtggtacaaggatgacacacccctgtccccgtcagaaaagttcaagatggcgctggagggccagatggcagagctgcgcatactccggctcacgccagctgatgctggggtctaccggtgccaggcgggtagcgcccagagcagtgctgaggttactgtggaagctcgggaggtgacagtgattcagccactgcaggatgcagaagccatggaggaaggccgggtctgcttctcctgcgagctgtcccataaggatgaagatatcgaatggtcactcaatggtacacccctgtacaatgacagcttccatgagatcagccatgagggctgtctccacaccctggtgctgaagagtgtccggcaggctgacacaggcaccgtgtgcgccacctcccccaaggtgtccgtttccgcccggctggtggttaaaggcaagccagtggtgttcctgaaagcactggatgacgtatctgcagaagagcgtggcacgctgaccctgcaatgcgaggtctccgaccccgaggcacgcgtggtttggcgcaaagatggtgtggagcttggtcccagcgacaagtatgatttcctacataaggcaggtgcccggggccttacggtccatgacctgagccatgaggatgctggactgtacacctgccaggtgggcagtaaggagacccagtccaaggtcagcgtacatgatcttcacgtgggcatcaccaagaggttaaagacagtggaggtgctggagggagagagctgcagctttgagtgtgtcctttcccacgagagtcccagtgacccagcagtgtggacggtcggtgggaagacagtgggtggttctggccactttcacgccgttcggcagggccgcaaatacaccctgacagtcaaagatgctgcactcagtgatgcaggagaggtggtcttctcggtgctgggcctcacttccaaggcctcgctcatcatcagagagaggccagtggacatcaccaagcccctggaggaccagcggacgacgcttggggaagatgtaatgctaagctgtgagctgtccagggcaggcacctctgtgcgctggctgaaagacgggaaggccatcaggaagagccagaagtatgacctgctcagtgaaggcacgcgggctgtgttggttgtccgcaaggcctcactcaaggattcaggggaatacacctgcgagacagaagcttcgaaaagcactgccaagctctgtgtggaagaaaaggcaaaccggttcacggaggagctggctgacctgcaggtggaagagaagggcagagctgtgttcacatgcaagacagagcacccagcatctgtcgtgacctggcgcaaaggcctcctggagctgcgcgcctcagggaagcatgtccccagtcaggaaggcttgaccctgaagctcaccatcaacgccctggagaggacagacagtgacacttacacctgtgacatcggccaagcccggacccaggcacggctcctcgtccacggccagaaagtgcgcgttattgaggacctagaggacactgctgtccaggagggctcctctgctaagttttgctgccgcatcgctcctgctgactacggccccgtgcactggttcctggataagacccccttgcacagcaatgagctgaatgagatcactgtccagcctggaggctatcacgtgctcaccctgcggcagctggcactcaaggactcaggcactgtctactttgaggcgggtgaccagcgaacctcagctgccctgcgggtgactgagaagccgagcatcttctctcggccactcacagacgtcacagtcacagaaggcgaggacctgactctggtctgtgaaaccaccactgtggatagctctgtgcgctggaccaaagatgggaagacactgaggccgtctgcacgatgccagctgagccatgaaggctgtcaggcccagctgctcatcactgccaccaccccacaagatggtgggcggtacaaatgtgagattggtggagcctccagcagctccattgtcagggtccatgctctgccagtgcggttcagggagtccctgaaggacgtggaggtaccagagggcaaggccgccacactgcgctgtgtgctgtcatccgtggctgcacctgtggagtggcgtcatggagatgatgtcctgaaatccagcaacaagtatagcctgcgccaagagggtgctgtgctggaattggtcatccgagacctgcagccccaggacagtgggcaatactcatgctcctttggggaccagacaacttcagccacactcacagtgaaaacctcttctgcccagttcgtagggaaactgagaaacaaggaggccacagaagggaccacggtcacacttcggtgtgagctgaccaaagaggcccccgtggagtggaagaagggaacagagaccctgagaaatggggacaaatacagtctgaagcaggatggagctgtgtgtgagctgcagatctgtagtctgctggtggcagatgcaggggagtactcgtgtgtgtgtgggcaggagaagacttcagccacgctgactgtcaaggctctgcttgtccactttgtcagaaggctcaggagcaaggaggccacagaaggagacacgaccacactgcagtgtgaactgagcaaggctgcccccgtggagtggaggaagggaacagagaccctgagagatggggacagatacagcctgaagcaggatggggctgtgtgtgagctgcaaatccgcagcctgaccatagcagatgctggcgagtacttgtgcacgtgtggacaggaaaagacctcagccacgctgaccgtcagggcccttccagctaagttcaaagacagtctgaagaatgaagaggctacagaaggcaccacagctacactgagctgtgaactgagcaaggcagctccggtgacatggaagaaaggaccgaagaccttgcaaagtggagacaaatatgtcctgaggcaggatggagctgtgtgtggactacagatccatggcctgaccatggctgatgctggggagtactcgtgtgtgtgtgggcaggagaagacgtcagccacgctgactgtcaggggcttgcctgccaaatttatagaagatctgagaagccaagaagccacagaaggggccacagcaatcttaagatgtgagctgagcaaggctgctcctgtggagtggaggaaagggtctgagaccctgaaagatggggacagatacaccctgaggcaggatggggccgtatgtgagctgcagatccgtggcctggctgtggtggatactgggacatacnnnnnntgtgtgtgtgggcaggagagaacctcagccacactgaatattaatgccctgcccaccaagttcacagagggtctgaggaatgaagaggccacggaaggcaccatggccactctgaggtgccagatgagcaaggctgcccctgtggagtggaggaaggggtcagagaccctgagagatggggacagatacagcctgaggcaggatggggccatgtgtgagctgcagatccgtggcctgaccatagaagattctggggagtacacatgtgtgtgtgggcaggagaagacgtcagccacactgagtgtcaaggccctgccctccagattcatagaagatttgagaagtcaagaggccacagaaggcaccatggccactctgaggtgccagatgagcaagactgcccctgtggagtggaagaaggggtctgagaccctgagagatgggggcagatacagcctgaggcaggatgggcctgtgtgtgagctgcagatctgtgacctggctgtcgaagacgctggggagtactcatgtgtgtgtgggcaggagaagacctcagccacactgagtatcaaggctctgccccccagattcatagaagacttgagaagccaagaggccacagaaggcaccatggccactctgaggtgccagatgagcaaggcagcccctgtggagtggaggaaggggtctgaaaccctgggagatgggggcagatacagcctgaggcagaatggtgctgtgtgtgagctgcagatccatgacctggctgtggaagacactggggagtactcatgtgtgtgtgggcaggagaagacctcagccacactgaatgtcaaggccctgccccccagattcatagaagacttgagaagccaagaggccacagaaggcaccatggccactctgaggtgccagatgagcaaggcagcccctgtggagtggaggaaggggtctgagaccctgagagatgggggcagatacagcctgaggcaggatggggctgtgtgtgagctgcagatccatgacctggatgtggaagatgctggccagtactcgtgcgtgtgtgggcaggagaagacctcagccgtgctgactgtagatgcactgccccccaagtttacagagggtctgaagaaggaagaggccacagaagggaccatggtaacactgaggtgccagatgagcaaagaagccacggtggagtggaggaagggagcaaagaccctcagcgatgggggcagatacagcctgaggcaggatggggccatgtgtgagctgcagatctgtggcctggctgtggaagacgctggggaatactcatgtgtgtgtgggcaggagaagacctcagccacactgagtgtcaaggccctgccccccagattcatagaagacttgagaagccaagaggccacagaaggcaccatggccactctgaggtgccagatgagcaaggctgcccctgtggagtggaggaaggggtctgagaccctgagagatggggacagatacagcctgaggcaggatggggctgtgtgtgagctgcagatccgtgacctggctgtggaagatgctggcgagtacttgtgcgtgtgtgggcaggagaagacctcagccacactaagtgtcaaggccctgccccccagattcatagaagacttgagaagccaagaggccacagaaggcaccatggccactctgaggtgccagatgagcaaggctgcccctgtggagtggaggaagggatccaagaccctgagagatggggacagatacagcctgaggcaggatggggccatgtgtgagctgcagatctgtgacctggctgtggaagacactggggactactcatgtgtgtgtgggcaggagaagacctcagccacactgagtgtcaaggccctgccccctagattcatagaagatttgagaagccaagaggccagggaaggtactgtggccactctgaggtgccggatgagcaaggctgccccagtggagtggaggaaggggtcagaaaccctgaaagatggggacagatacagcctgaggcaggaggggaacctgtgtgagctgcagatccgtgacctggctgtcgaagacactgaggagtactcatgtgtgtgtgggcaggagaagacctcagccacactgagtgtcaaggccttgccagccaaattcatagaagacttgagaagccaagaggccccggaaagttcaacagtcacattgcggtgtaagctaagcaagaaggcctctgtggtgtggaagaaagggtctgagaccctaagaaatggggccagatacagcctgaggcaagatggggctgtgtgtgagctggagatccgagacctgactgtggaagatactggagagtactcgtgcacatgtgggcaggagaggacctcagccacactgagcattatggctccacaggtggtattccagcagccactgcagaatctgcaagcagaagaaggctccatggccagcctgcggtgtgagttgtcagtccccaacgctgccatggtctggagcaagggtggtctggagctgcagggtgacacgcgccgagaggcacggcagcaggggtgtgtggcagagctgttgcttagggacctgcgtcgcgaggatgcgggcgagtacagttgcacctgtggctctcagaccacaagcgccacgctcatggtcacagctgctcctgtgcggttcctccgggaactgcaggcccaggacgtagatgagggggccaccgcacgcctgcgctgtgagctgagccgggaggctgtgagcgtggagtggcgcaagggctccttgcaactttttccttgtgctaagtatcagatggtgcaggagggcacaactgcggagctgctggtccatggggtggagcaggaggatgcaggcgaatacacctgcgatgcaggccacacgcagagcattgccaggctctctgtccgagcccccaagcccaagttcaagaccgacctgcaaagcacagagcaggaagcaggtggcacggcacggctgtgttgtcaactgagcgaagctgagccagggactccagtgcagtggctcaaggagggggtggagctgcacgtcggctccaagtatgagatgcggcgccaaggggctgtgtgcgagctgctgatccatgggctggaggccaaggacactggagaatatgcctgcctggtgggtggccagaagaccttggcctccctcagagtcaaagagcctgaggtgaccatcgtgcggggactcgtggacatggaggtgcaggccgatgaggatgtggagttcacttgcaaggtgtcacaggcaggagccacagacgtgcagtggcacctccaaggtctgccactgcagagcaatgaagtgacagaggtggctgtccttgcggacggctgtacccatgtgctccagttaaagggtgtgacactggaggatgctggtactgtctccttccacgtgggcggcctttcatcttctgctcagctcacagtccgagtccctgaggtgaccgttctggagcccctgaaggatgtgcagctcagcgagggccaggatgcccacttccggtgccgactgtccagggcctcgggccaggaggctcgctgggctttgggaggggttcccttgcagtgcaacgagatgaacgacatcactgtggagcagggcacactctacctgctcactctgcacaaggtgaccctggaggatgctgggaccatcactctccaagtgggctcatgctcctcagaggcccagctgaaggtcacagccaagaacacggtgttgcgtggcctggagaacgtggatgcactggagggcggtgaggctctgttcgagtgccagctgtcccagcctgaagtggccgcccacacctggctgctggacgacgagcctgtgcacacgtcggagaaggtggaggtggtctactttgagaacggactgcggcacctgcttctactcaaaaacctgaagccacaggacagctgccgagtgaccttcctggcaggggatgtggtcacgtccgcattcctcactgtgagaggctggcgcttggaggtcctagagcccccacatgatgcatctgtgaaagctggtatgcaggtccgcttcacatgcatactaagtgaggcggtgcctgtgggtgaggctacttggtacatcaacggggctgccatccaacctgatgacactgactggacagtcaccacagatggcagccaccatgccctgacgctgagcaatgcccagccccaacacgcaggagaggtcacatttgcagcacgggatgctgtggcctctgcacgcctctctgtgttggctcttcctgacccccctgaagatgctgaagtggtggggcgtagtgaccattctgtgaccctatcctgggtggctcccatgagtgatggaggtgggggtctatgtggttatcgtgtggagatgaaggaggcatccacaggccagtggcagttgtgccatgacttggtacctggtccagagtgcgtggtggacgacctggtccccgggaagacctaccgcttccgagtggcagctgtgggtccagcaggtgctggggagcctgtacacttgccccagatggtcaagatagccccggccccggccccggcccctgccccagcccctgccccagaaacacggcaggcagtagttggtgaagacatctgtctggagttggaagtggcagctgatggtggcgaggtcgtctggcacaagggaacagagcgcatccagcccggagggcactttgaggtcctctctcggggtcagcggcagatgctggtgatcaagggctttaggaccgaagaccaaggggagtaccgctgtggtcccattcagggtctgccctcctcaggagctgccacgttcaatgtggtcatgacctcaggctctggggatgaggtcccggcacagcctagcctgcctcccgaggcagcccaggagggtgacctgcatctgctttgggaggcccttgcccggaagcgccgcatgagtcgggagcccacgctggactccatcagtgagctgcctgaggaagacagccgtgtgcagcatctgcggcaggaggcagaagagacagctcccgacctctctgaaggctactctacagcggatgagctagcacgcacaggagaggccgacctctcacacaccagctctgacgatgagtctcgggctggcaccccttccctagttacctacctcaagaaggccgggggtcctgggatctcacccttggccagcaaggtgaccacgtctgtgaagccacaaaagcagcaggagccagtcgtgcccacgtgcccaccgccgggagacttgagtgcagcagatttgatggatccatccctggacaaggctgctgtgaagattcaggctgcctttaagggttacaaagtgcggaaggagatgaaacagcaggaagggcctgtgttctcacgaacatttggggacacagaggcacaggttggggatgtgctgcggctagagtgtgtgctggccaccaagactgatatgcgggcctgctggttgaaggatggcatcgagttaacagatgggcgccattaccacatagaccagctcaaggatggtacctgctctctgctggtcactggcctggcccccactgactctggccgttacacctgtcaggtgagcaccaagtctggccgtgtgagccacagtgcctgcgtggtggtcagtgggacagagagcgaggccgagagctcctctgggggcgagctggatgatgctttccgccgggcagcgagacgcctgcaccgcctcttccgcaccaagagcccagctgagctttcagaggaggaactcttcctcagcgctgatgaaggccccggggagccagaggagcccgcagactggcaaacataccgagaggatgagaactttgtgtgcatccgttttgagtcccttgcagaggcccgccaggcagtcacctgcttccgaaacatgtttgccactatgggcatcggggtggagatcagcctaggggagcagggaccccggggagtggagatgcgcatcggcaaggtggcccctactgtcacccctgcagtgccgcttgcaaagacacctggcctgcagacttcagatgctgccccagtgttcctgaccgagctgcagaaccaagatgtgcaggatggataccccatgagcttcgactgcgtggtaacgggccagcctgtgcccagtgtgcgctggttcaaggatgggaagctgctagaagaggatgaccactatatgatcaatgaggaccaacaggggggtcaccagctcatcatcacagctgtggtgccggcagacatgggtgtctaccgctgcctggcggagaacagcatgggcgtctcctccaccaaggctgagcttcgtgtggaattgaccagcacagactatgatactgctgcggatgctactgagacctcatcctacttcagcgcccagggatacctgtccagtcgggagcaagagggaacggagtcagatgaggggcagcttccccaggtgctggaggaactgaaagacctccaagtggcccccgggacacgcctggccaagttccagctcaaggtgaaaggctatccagctcccaaactgtattggttcaaagatggccagcccctgaccacgtctgaccacatccgcatgactgacaagaagaccctgcacaccctggagattgtctcggtcactcgggaggacagcggccagtatgcagcctacatcagcaatgctgtgggtgctgcctattcgtcagcccggcttctggtccgaggtcccagtgaaccagaagagaagccagcatcagatgttcatgagaggctggtgccaccccgaatcctggagaagttcacccccaagaaagtgaagaggggctccagcatcaccttttcagtgaaggtggaaggacacccggcccccagtgtgcattggctcaaggaggaggcagagaagggagtcctgtggattggccctgacaccccgggctacaccatggccagctcttccaagcagcatagcctggtcctgctggacgtaggccgacagcaccagggcacctacacatgtattgctaccaaccctgctggccaggcgctctgctctgccagcctgcacatctctggcttggccaaagaagaagagcaggagagagtgaaggaggccctcatttcctctttcctgcaagggacaagccaagctgtctcagcccagatgtcagaatccgcaggttttgctgatcttgtcgggcaaagcaaaggcgagtctctggtggctgaggaggcccacagtcacctgtcccttgctgaggtgggcactgaagagttcctgcagaaactcacctcgcagatcacggagatggtatcggccaagatctctcaggccaaactccaggtgcctggaggtgacagcgatgaagagaccaagacaccatctgcttctcctcggcatggccggtcacgtccttcctccagtgttcaagagtcctcctcagagtcagaggatggggactcccgtggtgagatctttgacatctatgtggtcacagctgactatctgccactgggagctgagcaggatgccatcattctgagagaaggccagtatgtggaggtccttgactctgcccatcccctgcgctggcttgtccggaccaagcccaccaaatccagtccttccaggcagggctgggtgtcacctgcctacctggataagaggctcaagctgtctcctgagtgggggcccactgaggcccccgagttccctggcgaggctgtgtctgaggatgagtatagaacgaggctgagctctgtcatccaggagttgctgagttcagagcaggcttttgtgggtgagctgcagttcttggagagccaccacatgaagcacctggagcgatctccccgagtacccgcagctgtggccagccagaagacagtcatctttcgtaatgtgcaggacatcagccatttccacagcagcttcttgaaggagctgcagggctgtggcaccgacgatgatgtggccatgtgcttcatcaagaaccaggaggcctttgagaagtacctcgagttcctggtgggccgcgtgcaagctgaatcagtggttgtcagcaccccagtccaggagttctacaagaaatatgcagaagagacactgtcagccaaggaccccacacagccacccccacctcctcttcagcactacctggagcagccagtggaacgggtgcagaaataccaggccttgctgaaggagctaatccgcaacaaggcccgcaaccggcagaactgcgcgctgctggagcaggcctatgctgtggtgtctgccctgcctcagcgcgccgagaacaagctgcacgtttctctcatggagaactacccaggaaccctggaggccctgggagaacctatccgccagggccacttcatagtgtgggagggggccccaggggcccggatgccttggaagggccacaaccggcacgtcttcctcttccgaaactacctggtgatctgcaagccccgaagagactctcgaaccgacaccttcagctatgtgttccggaacatgatgaagctgagtagcatcgacctgaatgaccaagtagagggggatgaccgcgcctttgaggtgtggcacgaacgggaagactctgtgcgcaagtacctgctgcaggcacggaccgtcatcatcaaaaactcctgggtgaaggagatctgtggcatccagcagcgcctggcccagcctgtgtggcgtccccctgagtttgaagaggaactagcggactgcacagccgagctgggtgaaacggtcaagctagcatgccgagtgacgggcacacctaagcctattgtcagctggtacaaagatgggaagccagtggaggtggacccacaccacatcctcattgaagaccctgacggctcctgcaccctcatcttggacaaccttactggcatagactctggccagtacatgtgttttgcggccagtgctgctggcaacgccagcaccttggggaagattctagtacaagtgcccccacggtttgtgaacaaggtccgggccacaccctttgtggagggagaggatgcacagatcacctgcacagtggaaggagccccgtaccctcagatcaggtggtacaaggatggtaccctgctagccccgggcaacaggtaccggatgttgaatgaaccccgcagtggtgtgctggtgctggtgatccaggcggccagcaaggaggacctgggacactatgaatgtgagttggtgaaccggttgggctcaacacgtggtggtggagaactatacatgcagagccctgcactgcgtgcccgggaccagcaccaccgggaacagattgtggctgccgtagaagacacctccgtggagggctctgcccactctgcccaggacggagctgaccaacaagctgcttctgtcctttggaggttgctgggctcagaagccctaggcccctccccaggggatctcccgaacaccagacaaagcgagccacctgcatttgaagaggctgcatcccagatcccaggagcagcttcgggcacacctggtgaacttccagaggtctcacagcctggcacacacaagggcctggagcaggagacgacaagttctgggtcccagggatggactgtacccattcgggtggagggaacagcctggccaggtgcaggcaccgggcagctgctcttggatgtgcacagccaagtcatcatggagaccacacagaggacctacgtgtgccaagctcctgacacaggtgtcacaagggccccgtccatgcaggtcactattgaggatgtacaagtacaagtaggggacatggcacagtttgatgctgtcattgaaggccacccaccacccatagtaacctggtacaagggcagcacccagctgacgagcagtgcccggctgagccaacggcaagatggaacgacatactccttggtgttgactgacgtggctccacacgatgccggtgtctacacatgtgttgccaataatgcaggtggacaggtgctctgcaaggcagagctgctggtccatgggggggacaagctagatgccgaaaatcaagtctatcggagaaaactgcattccttctatgacgttcaagaagagattgggaggggtgtgtttgggtttgtgaaaagggttcagcacaaaggaaacaagatgttctgtgccgccaagttcatccccctacggagtaaaactcgggcccaggcataccaggaacgagacatcttggctacactcggccacccactggtcactgggctcctggatcaatttgagacccggaagactctcatccttatcttggaactgtgctcgtctgaggagctgctggatcggctcttcaagaagggtgtagtgactgaagccgaggtcaaagtctatatccagcagctggtggaaggcctacactatttgcacagccatggtatcctccacctggacataaagccccccaacatcctgatggtgcacccagctcgggaagacatcaagatctgtgactttggctttgcccaaaagatcaccccttcagagccacagtacagcaagtatggctcacccgaattcgtgtccccagagatcattgagcagaatcctgtgagcgagggctcagacatctgggccatgggcgtcatctcctacctcagcctcacctgctcatccccatttgctggagagagtgaccgcgccaccttgctcaatgttttggaggggcgggtctcctggagcagtcccacggctgctcatctgagtgaggacgccaaggacttcatcaaggccacgctgcaaaggacccccagggccaggcctagtacttcccagtgccttgcccacccctggttcctgaaatccatgcctgctgaggaggcccacttcatcaacaccaaacagctcaagttccttcttgctcgaagtcgctggcagcgttccttgatgagctacaagtctatcctggtgatgcgctccatccctgagctgcttcagggtcccccagacagtccatctctaggagtggcccggcacctacgaggggaagccagtggcgcctctagctcatcatcttcctcagacaacgagcttgccccatttgccagggctaagtcgctgccaccttctcctgtgactcactcgccactgctgcaccctcggggctttctgcggccttcggccagcctcccagaggagacagaggccagcatgcccactgctgatgcggccgtgccagcgtccccacagagtgctgggcctccggcaagcccaggttgtgtgccccggcacagcgtcatcagcagcctgttctaccagcaagctggcgagggtgcagagcgtgggaacaaaacatcgggtgccaagaggcaccctgcgcggaggcggcacctgctaaagggtgggtacattgcaagggccttacccggtctgcgtgagcccctcatggagtacagcttgttggaggaagaggcggctagggaagagcaggcctctctgatgaccaagacaccctcctttgagactgccctgcgactacctagttccagtgtcagagaggtcccaggccgaagccactccctggacaacccaccagtcacgactggcccctctcctgaggcatgcaaggaacaactcctgttcccaccctccacggggttgactcatgaaaccactgccaaggacagggggcacaaagaggggttcttgcaggagtctgtcccctttccacctatgagtggtgactcgaggcctgggaagcaagagggatcatcccaggacagttgtagagggaaaccagcctcttcctgtcactctgagctgggttctggttcccaggagggctgtggccctccatcatctcaatcgcttggctccttacctccacagtcattgaagaaggagctctcaacgtcctgtggcccactcttttcagaacagcctcaggcagccccattcccaactcaagtaagcccccttctgggttctgagaaggaacctcaggatggctctctatctgaagggccagttccagttccctccagttctccagggtcagcttcccaagtagatgcatccttggatactgaaggcttgtctgaagctggggacacatgtgacttcacgcctcctccacagcggcctcaggagcaggccaccacccggaagttctctctggagtcccgtgggggctatgcaggggtggcaggctatggtacttttgcctttggcggggatgcaggggggatgctagggcagggtcctctctgggccaggatggcctgggctgtgtcccagtcctcagaagagcaggatgaagctgcgactgagagccctcaacctctggagagcttggggcccattgctgaggccagtggggttcccctaaggacctctccaagcctcaccccttgggaggaagttgagcaggtttccctggtgcagatccgggatctgtctggtgatgcggaagcagctgacactatctccttggacatttctgaggtcgatcctgcctacctcaacctctcggatctatatgacatcaaatatctcccatttgagttcatgatcttcagaagggtccccaaacctatagagcagccagagtcacctggctcagaaaccgaagctgggcaagggctggcagatttcctggaggaggccgcgtggccctggccaggcgagctgggactgcgtgctggtctggagattacagaggagccggaggagccaggggacctggaagcactgctgggcgaggctgctgtgggcaggaagcgcaagtggtccccctcccggggcctcttccaattccctgggaggtgcctgtcaggggaggagcctgtggagcttgggctgcgccagagggtgaaggcttccatggctcacatctccaggatcctcaagggcaggccggaaggtcctgagagggaagggcctcccagaaagaaggcaggcctagcttctttccggctgtcaggcctgaagggcagggaccaagcaccatccttcctaagagaactctcagacgaggctgtggtcctgggccaatcagtgacactggcctgccaggtgttggcccagccaactgcccaggctacctggagcaaagatggggtcctcctggagagcagcggccacctcctcatctcctccaccctgaagaacttccagctgctgaccatcctggtggtgaaagaggaggatctgggcacatatacctgctgtgtgagcaacccgctggggacagcagtcaccacaggtgtcctccggaaagcagagcgcccttcatcttctccacgccctgaggtgggggaactatacaaggatgcggtgctgctggtctggaagcctgtggaatcctgtggcccggtgacctacattgtgcagtgctgtatagaaggaggcagctggacaaccctggcttcagacatctctgactgctgctacctcactggcaagctatcgaggggtggcatgtatatcttccggacagcatgtgtcagcaaagcaggaatgggcccctacagcagcccctcagaacaggtcctcctcggaggacccaaccacctggcctctgaggaggaaagcagccgggggaggccagcccagcttctccccagcacaaagacctttgccttccagatgcagatccggaggggccgcttcagtgtggtgcggcagtgcagggagaaggcaagtgggcgggccctagctgctaagatcgttccctaccaacctgaggacaagacagctgtactaagagaatacgaggcacttaagagactgcaccacccacatctggcccaactccatgccgcctacctcagtccccggcacctggtgctcatcctggagctgtgctctggccctgagctgctaccctctttggcagagagggaatcctactcagagtctgatgtgaaggactacctgtggcagatgctgagtgccacccagtacctgcatgcccaacacatcctgcacctggacctgaggtccgagaacatgatggtcactgagtacaacctgcttaaggttatagacctgggaaatgcccagagtctcgaccaagagaaggtcccagcccctgagaacttcaaagactacctggagaccatggctccagaactcctggaaggtcaaggggctgttccacagacagacatttgggctattggtgtaacagccttcattatgctgagtggcgagtacccagagagcagcgaggggactcgcgacctgcagaaaggcttgcgcaagggactcattcggttgagtcgctgctatgcaggattatcaggaggagccgtagccttcctgcagagttcattatgtgctcaaccctggggccgcccgtgcgcttccacctgcttgcaatgcggatggctgacagaggagggccccaccggctcccggcccacgcccgtaaccttccccaccgtgcggttgcgcgcctttgtgcgcgagcgcgagaagcggcgtgcgctcctctacaagaagcataacctggcccaggtgcgc

SEQ ID NO: 49 - DNA, 1519 bp, Mus musculus
gggtctttactctccaatcagtccagagctgtggaagcctcctcctgaggctctcaacctatgctcttagcctaaaacccattacgtcttcagaaacgtgactcttttctccaaggggcagcagatccctcctggccttctgcttctctgaccctcttgccctctgaaacaagtcagacctcagctgcgtcccttcccctggctgacgggcaataagctggcccaccaagcccagttctgtggcgccctgccttccatgaggagcagcagctggcgcaagtcggatcagagggtgttcatagaacaggttcgagaatgcatgaacaacggttacttgctctcctccaagaagatcggatctggtgctttctccaaggtctacctggcctatgcaacacgtgagcgaatgaagcacaaccctaggctatcctctgacttgcggggcaagcgccacactatggtggctatcaagattgtgtccatggctgaagccccggcggaatactccagaaagttcctgccccgtgagattttatcactcaatgctacctacaagcacatgaacatagttcaactgtatgagacctaccagaacagccagcgctcctacctggtactggagttggcagctagaggtgacctgttggagcatatcaacgcagtgtcagacctccgatgttgcccaggactggaggaggaagaagcccgaaggctgttctggcaactggtcagcgctgtggcccactgccacaatgttggcattgtacacagggacttgaaatgtgaaaatatcctgttggatgaccagggcttcataaagctgacagattttggctttgccaactgggtggggctcaagaactccctgctgagcaccttctgtggctcggtggcctatacggccccagagatcctcatgagcaagaagtacaacggtgagcaggctgatctgtggagcctagggatcatcctccatgctatggtgtctgggaagctgcccttcaaggaacaccagccccatcgcatgctgaacctgattcgtcgaggtcccatcttcaggccagggctgtccccagagtgccgggacctgatccgagggctgcttcagctgcatccatgtgaacgtctggacctacagcaggtagctgctcactgctggatgctgcctgcagaacacatgctgtcctctgcacttggagctccccgagaacaggatcattcctggtccacagtagccccagacaacacagagcctgacagagacaccaggcatgccagaagcaaaggctccagctcctccagtggcaggacatctccaaggagaccgtctctggcccagctgtgcaacacctggaagcctgcaccagagcaataggttctaccacccttgggcttgggcgtaccatggcaggtggctgctctctatgtcccatgttccctaacaggaacatggctgggcactctctgctgaattgagggtgggtgggtgtgggaagattaaaaaaatgttcattctttg

SEQ ID NO: 50 - DNA, 2081 bp, Mus musculus
ttgagctctctatcaacagcagcttacatcactgagaagataattttgaagacatactttgctgagaagacaactgagaagctgtacgaatgggatgaacaggcgtcacttgactgactatccgctgacgtttgagtgctagcgttgctcatagggtactgctacctagtgatgcacctgctcttacagtaccccatttcatcgtgcttgtcttgattaaagaattcaaagtggagtaccgcaaacttgatatggataataaaaagaaagacaaggacaaatcagatgatagaatggcacggcccagtggtcggtcagggcacagcactcgaggaactgggtcttcttcatctggagttttaatggttggacctaactttagagttgggaaaaaaatcggatgtggcaattttggagaattacgattagggaaaaatttatacacaaatgaatatgtggcgattaaactggagcccatgaaatccagagcaccacagctgcatttggaatacagattctataagcagttaggatctggagatggtatacctcaagtttactattttggcccttgtggtaaatacaacgcgatggtgctggaactgctgggaccgagtttggaggatttgtttgacctctgtgatagaacattttctcttaaaacagttctcatgatagctatacagctgatttctcgtatggagtatgtccactcaaagaacttgatatacagagatgtgaagcctgagaacttcttaataggacggccaggaaacaaagcccagcaagtcattcatatcatagattttggtttggcaaaggaatatattgatccagagacaaagaaacatataccatacagagaacacaaaagccttaccggaaccgccagatacatgagcataaacacacatctaggaaaagagcagagtagaagagatgatttagaagccttaggccacatgttcatgtacttcctgagaggcagtcttccttggcaaggcttaaaggctgacacattaaaagagaggtatcagaaaattggagacacaaaacgagccacaccaatagaagtgttgtgtgagaacttcccagaagaaatggcaacgtatctccgttacgtacgaaggctggatttttttgaaaagccagactatgattacctaagaaagctttttactgacttgtttgatcgaaaagggtatatgtttgattatgaatatgactggattggtaaacagttgcctactccagtaggtgcagttcagcaagaccctgctctgtcatcaaacagagaagcacaccaacacagagataagatacagcagtctaaaaaccagtcggcagaccacagggcagcttgggactcccagcaggcaaatccccatcatttgagagctcaccttgcagcagacagacatggtggctcggtacaggttgtaagttctacaaatggagagctgaacacggatgaccccacggcaggacggtcgaatgcacccattacagctcctacagaagtggaagtgatggacgagacaaagtgctgctgttttttcaaacgaaggaaaaggaaaaccatacaacgtcacaaatgactggacacagacagatcctggggagttacttacatgttcatatgctgtctcgtgattaaaatcatctctgtagtgaccacatatattttcaaggactcactcttgaaacaaaaatgtcatactttcatatttcattgtgtgattgtcttacattcattccccccacccttaatttaactttatggaagctttaagattttgtcaaaacacgagtgctttgcccatcattgaattgaatggaccaatgaagtggtattgatgaacacagttccataggacatttttcagaggctcttctgttctagaaaacaatacaggtgtccaaatatcaattaattgtacctaatttgatttctttatgttttctataaaagcataatcaaacaggaattttcttcccactggatagtgcagcagagaaaacagttgcccaaatattaaaaacaactttcttgaacagttcctgttttgtggcatctgcat

SEQ ID NO: 51 - DNA, 4209 bp, Mus musculus
gagcgggcgctgcagtagtcgccgcagcggcgatgggagcggtagggacgaggaggcggcggcggcaggaggaggaggaggagcaggggctggcacgagagcagcggcccgggacaatccgcagcaatacccgcagccgctgccgccgcctttagacgcggacggcatccgaagggaccgccggccgtctaagccgcgctccggtcccgccgcagtgggcggcgggggatgggcaggcggtggcgggcccgcctgctgagcggtgactcctgccggtgcggaccctgagctagaccctcgtcctccgtcagagatcctgcgtccgccgcggcccagaattgtaaaaccggtaagatcaagtgcctattgaaagagactcactcttggctaagaagagaaataggaaataggttaaatggaatccacccttgggagctagatgcctgtgtagctgttttacctcatcagggttttgcaatgagtggaggaggagagcagccagatatcctcagtgttggaatcctggtcaaagaaagatggaaagtgttaagaaagattggaggtgggggctttggagaaatttacgatgccttggacatgctcaccagggagaatgtggcgctgaaggtggagtcagctcagcagccaaagcaggttctgaagatggaggttgctgtgttgaagaaactgcaagggaaagaccatgtttgtagatttattggctgtgggagaaatgatcgtttcaactacgtggtcatgcaattgcagggacggagtctggcagatctccgccgtagccaatcccggggcacattcactattagcactacccttcgtcttgggaaacagattctggagtctattgaaagcatacattctgtgggattccttcacagagacatcaaaccgtcaaacttcgccatgggacgtttccccagtacatgtaggaaatgtttcatgcttgattttggcttggctcgacaatttactaattcctgtggtgacgtcagaccacctcgtgctgtggcaggctttcgagggacagttcgttatgcatcaatcaatgctcatcggaacagggaaatgggaagacatgatgacctttggtctttattctacatgttggtggagtttgtggttggccaactgccttggagaaaaataaaggacaaggagcaagtaggctccattaaggagagatatgaccacaggctcatgttaaaacacctccctccagaattcagcacctttcttgaccatatttcctctttggattattttacaaaaccggactaccagcttctaacatccgtgtttgacaatagcatcaagacctttggagtaattgagagtgacccgtttgactgggagaagagtggaactgatggctccctgacaaccaccaccacctctgccacccctcagctgcacacccgcctgacccctgctgctatcggaattgcaaatgccacccccatcccaggagacttgcttcgagaaaatacagatgaagtgtttccagatgaacagcttagtgatggggagaacggaatccctgttggtgtatcaccagataaattgcctggatctctggggcacccacgccctcaggaaaaggatgtctgggaagagatggatatcaacaagaacaagataaagctgggaatttgcaaagcagctactgaagaagaaaatagccatggtcaagtaaatggcatactcaatgctccaagccttggttcaccaattcgtgtccgatcagagattactcagccagacagagatgttccgttagtaaggaagctacgttctattcacagctttgagctggaaaaacgtttgacacttgagccaaagccagatactgacaagtttctggagacctgcatggagaaaatgcagaaagattccagtgcaggaaaagaacctgtcccccctgctctgcctcataagccgtgtgtccccgtcgtgacccacactgaccacatctggcactatgatgacgaatatcttcctgatgcctccaagcctgcctctgccaacaccccggagcaggcagatggtggtggcagcaacggatttatagctgttaacttaagctcttgcaaacaggaggttgattccaaagaatgggtgattgtggacaaggagcaagaccttcaggactttaggacaaatgaggtgttaggccataagacaactggaagcccttcagatgaggagcctgaagtgcttcaggtccttgagggatcacctcaagatgaaaagatccaagtaggtccttggactgacaaccatcacttaaagaaggaaagctcaggtgtggttttagcactttctgctgaatgccctgctactgctgcttcagaactgtacacagataggctagacctccaggctggagctgcaagtcagttcatcacagtgactcccacaagtcccatggaggcacaagcagaaggacccctgactgcgattacaattcctagaccttctgtggcatcaacacagtcaacttcaggaagctttcactatggcccacaaccagagaagaaagatcttcagcccttggagcccactgtagaactgtactctccaagggagaacttctccggcttggttgtgacagagggtgaactagctagcggaggaagcagagtggatttgggacttcagatagatcacactggtcatgacatgttacccaacatgagagatggtgacacatctcaagacttgggaccaaaagaccctcctgaccataatagattagctgtgaaagaatttgaacatctccctggagaaacagaagagagaagccttcttctgggctcagagaatgaagatgagaggttaagtaaagggcagcactgtattgaagtctcttccccaggagagttagtgactgcagagagggctcagttagctgccacagaacctctgcatgtatcagagacacagaactgtagtgtgctaccaaatcaggacaaaacccatgagataatgaagcttttggcagttggaacttcagaaatttctcctcaagccattgacccacatgctgaagggcagataggccagatggcagcaatgcagaaaaataagctatttaaagatgatggtattcagagtgaaagcttgccaaggcagcagggagacctctctgcttttttgcaccaagagggtaagagagagaaagttgtccctagaaatggagagctctatcattgtgtctcagagaatgagcatggtcctcctactcggaaggacatgctccggtcatcctttgtgaccaggcacagccggatccctgttttagcacaagaaatagactcaacttttgaatcatcctctgctatttctgcaaaagaaaagcttctacagaagaaagcctatcagccagaaatagtcaaacttcttgtagaaaaaaggcagttcaagtctttcctgggagacctctcaagtgcctctgataagctgatagaggagaaactagccgctgttccagtccctttttctgaggaggaagtcttcgctcccttttctagactggcagcagattcccacctgagtagatcagttgaagatagctttctgtcacccatcatctcccaggctagaaagagcaagattccaaggccagtatcctgggtcagcacagatcaaattaatggctccgcttcacctcagttcttgcctcggccaccaccaggaaagccaccagtcaggcctggagtagaagccaggctacgcagatataaagttctagggagtagtaactctgactcagaccttttctctcgcctggcccaaattcttcaaaatggatctcagaaatcccggagtactacccaatgcaagagcccaggatctcctcacaatccaaaaacaccacccaagagtccagttgtacctcgaaggagtcccagtgcctctcctcgaagctcatccttgcctcgaacatctagttcctcaccatctagggctggacggccccaccatgaccagaggagttcttccccacatctggggagaagcaagtcaccccctagccactcaggatcatcgtcctccaggaggtcctgccaacaggagcattgcaaacccagcaagaatggcccaaaaggatctggcagcctccaccaccactcaaccagctctaaaactcccccagggaagagtaagccagccagtaaactcagcagatag

SEQ ID NO: 52 - DNA, 4224 bp, Mus musculus
ggtgggcagctccccacttcgcagccgccgccgtcgcccgaggaggatcggggccgggccgggccgggccgtgatggtcgcggtcgggaggccgccgccgccaccgccggagggagcgggccgcccagcgctgcactgagccgcccccgccccgccccggccccgggggatgcgccgccccgcgccgctgccttcaccgccgccgccgcagccgcagccgcagccgcagcggacaccgagcaggtagatggccccccaagggcaggccctgcgggcacccctccctccggctggcggatgcagtgcctagcggcagctcttaaggacgaaaccaacatgagtgggggaggggagcaggccgacatcctgccggccaactacgtggtcaaagatcgctggaaggtgctgaaaaagatcgggggcgggggcttcggtgagatctatgaggccatggacctgctgaccagggagaacgtggctctcaaggtggagtcagcccaacagcctaagcaggtcctcaagatggaggtggctgtgctcaaaaagcttcaaggcaaggaccacgtgtgcaggttcattggctgtggccgtaacgagaagtttaactatgtggtgatgcagctccagggccggaacctggctgacctgcgccgcagccagccaaggggcactttcacgttgagtaccacactgcgcctgggcaagcagatcctggagtccattgaagccattcactccgtgggcttcctgcaccgtgacatcaagccgtccaactttgccatgggccggctgccctcgacctacaggaagtgctacatgttggactttgggctagccaggcagtacactaacaccactggggacgtccggcctcctcggaatgtggccgggttccgggggactgtccgctacgcctcggtcaatgctcacaagaaccgggagatgggccgccatgatgacctgtggtccctcttctacatgctggtggagtttgctgtgggccagctgccctggaggaagatcaaagacaaggagcaggtggggatgatcaaagagaaatacgagcaccggatgctactgaagcacatgccatccgagtttcatctcttcctggaccacattgccagcctcgactacttcaccaagcccgattaccagttgatcatgtcagtgtttgagaacagcatgaaggagcggggcattgccgagaacgaggcctttgactgggagaaggcaggcactgatgccctcctgtccacgagcacctccaccccaccccagcagaacacgcgacagaccgcagccatgtttggagtggtcaatgtgacaccggtgcctggggacctgcttcgtgagaacactgaggacgtactgcagggagagcacctgagtgaccaggagaacgcacccccaatcctgcccgggaggcctccagagggcttgggccctggtccccatcttgttccccaccctgggggtcctgaggctgaagtgtgggaggagacagatgtcaaccgcaacaaactgcgcatcaacattggcaaaaccccctgtgtggaggaagagcagagtcgaggagtaggggtccccagttccccagtgcgtgcccccccagactccccaacaaccccagtgcggtctctatgctaccggagggtcaacagcccagagtcggagaggctgtctacagctgctgatggtcgggtagagctgcaggagaggaggtcacggatggatctgcctggctccccctcccgccaggcctgctcctcacaaccagctcagatgctgtcagtggacacgggccatgctgacaggcaggccagtggccgcatggacgtctctgcctctgtggagcaggaggccctgagcaacgccttccgctcagtgccactggctgaggaggaagactttgacagcaaggagtgggtcattattgacaaggagacggagctcaaggacttccctcccggggctgagcctagcacatcaggcaccactgatgaagagcccgaggagctgcggcccctgcccgaggagggcgaggaaaggaggcgactggggacagagcccactgtcaggccgcgtggacgtggtatgcacacgctgacagaggaggacccacggcagatgctgccccagcctgcaccacctcagttgagccaggctgatggccggtcagagacatcacagccacccacgcctggcagcccttcccactctcccttgcactcgggaccccgacctcgacggagagagtcagatcccacgggccctcagagacaggtgttctctgtggcgcccccgttcgaggtgaatggctttccacgagctgtgcctctagccttgccctaccaggacttcaagagagacctctctgattatcgagaacgggcccggctgctcaacagggtccggagggtgggcttctcacacatgctactcaccgcccctcaggtcccattggctccctttcagcctcaggccaatgggaaagagggagaagaggaagaggaggaggaagaggaggaggaggaagaagaagaagaagaagaggaagaagaagaggaggaagaggaggaagaggaagaggaggaggaggcaggggcccttggggaggtgctggggcctcgaagtggctcaagcagtgagggtagcgagcggagcaccgagcggagccaggagggcgccccgtccacactgctggctgacgaccagaaagaggccaggggccgggcctccatggctgatggggacctggagcctgaggagggctccaaaacgctggtgctcgtctcccctggtgacatgaagaagtcaccagtcactgccgaactggcccccgaccctgatctgggcaccttggctgcgctcacccctcagcacgagcggcctcagcccactggaagccagctggacgtatcagagccaggcaccttgtcctccatcctcaagtccgaacccaagccctcaggacctggagcagggggtggggttgggctggtggcccctggggctggggtcacagcagtgacgtcaccattcaccaaagtcgaaaggacttttgttcacattgcagagaagtcccacctcaacgtcatgtcttccgggggacaggcctccaggccagaggagttgagcactgggggcgagttgggcctggaggtgctctctgaggggggcatcgcagaggaaggggccccagcacctctggagaatggcatggctttggcagggctggacgggactgagatggaaagttgtgctctgtcgggccctcccggagaaacgccctcagaagtagtcacagactccttgcccaatgggccagcccttgctgatggaccagctccagcatcccaacaagagccagtaaccaagaaagggaccaccatctcccccagtcgccatgctatgccaggatctcgccccagaagccgtattcctgtcttgttgtctgaagaggatacaggctcagagccttcgggctcactgtcggccaaagagcggtggagcaagagggctcggccacagcaggacctggcacggctggtgatggagaaaaggcagggtcggctgttgctgcggctggcctcaggagcctcatcctcctctagtgaggagcagcgccgtgcctctgagacactctcaggcactggatctgaggaggacacacctgcctcagaacccacaacagccttgcctaggaaggctgtgcgggcagcgaccacccggagccggattccccgtcccatcagtgtgtccatgcctgtggaaggccagcagcttcctggaagaccccacggtgcggcctcagcgaccgacttggccatcaccagcaggctccagctgcagaagccctcagggttggcccctgctgctgacctccgtcccaaacagtccgcgagccggggtcccggcccaggtcgcgcccaagtctccaagcccgcagcaccccgcagtcccggcctccccgcctccaccgcgcgccaccccagcgggtccccgcggagccagtccctgtcccgtaaagagagctcctccccctcgcaccaagcccggcctggcgtccctccatcccggggggtcctccaagtcagatctcagccggaggcctccccggtggcccccaagaaaggacccaaggggaaacaactgcagactcagcgcgcagcaaccaaaggccgggcggtggtttcagagggtcggcccggggccagataa

SEQ ID NO: 53 - DNA, 5272 bp, Mus musculus
cccgacgtcaggacgatggagtgaagcgcggcccgcggtggcacttccgcgttgcgccgccggagcccgaggccgccgccgccgccgccaccgccgccgcccggcacggccggctttccgccgaggataggatcctcccgcgccaggccctgacgccgctgcgcacacaccgcgactggaaccggggacgcgcgtcccgacccggattatcgtggcgcgactcccggccggccctgctgctcgctacccctccgccgcggctgccgtcccccttcccggcgggggacatggccagggtctgaccccggaggaggccgcacccgcgccgcactctgcggcgggctctaggcgatgccgagtagctcggacacggcgctggggggaggcgggggcctgagctgggccgagaagaagttggaggagcgccgcaagcggaggcgattcctgtcccctcagcagccgccgctgctgttgccgctcctgcagccgcagctcctgcaaccgccgccgcccccgccgcctctgctcttcctggctgcccccggcgcggccgccgccgcagccgccgccgccgcggcctcctcctcttgcttcagcccgggccctcctctggaggtcaagcggctggcgagaggcaagaggcgccccggagggcggcagaagcggcgccgcgggccccgcgccgggcaggaggcggagaagcgccgggtgttctggctgccccagccgcagcaggacggcggtggcggtgccagtaacggcgggggtgtgaccccgctggtggagtacgaggatgtgagctcccagtcggagcaggggctgctgctggggggcgccagcgcggcaacggcggcgacggctgccgggggaacggggggcaacggcgggagtccggcctcctcctccggcacgcagaggcgcgcggaggggtcggagcgcaggccgcgccgggaccgccgcagcagcagcggccgcagcaaggagcgccaccgcgagcaccggcggcgggacgggacgcgcagcggcagcgaggcctcaaaggcccgcagccgccacggacacagcggcgaggagcgggcggaggccgccaagagcggcagcagcagcagcagcggcggccgccgcaagagcgcgtcggctacgtccagcagcagtagcagccgcaaggaccgggacctcaaggcccaccgcagccggactaagtcgtccaaggaaccgccctcggcctacaaggagccgcccaaggcctaccgggaggacaagagcgagccgaaggcctacaggcggcggcagcggtccctgagcccgctgggaggccgggacgaaagcccggtgtcccacagggcctcgcagagccttcggagccgcaagtcccccagtccggcgggaggtggcagcagtccttattcccggcggctgccgcgctccccgagcccctatagccggcgccgctcgcccagctacagccgccacagctcctacgagcggggcggcgacgtatcccccagcccgtacagcagcagcagctggcggcgctcgcgcagcccctacagcccagtactcagacgatctgccaaatcccgaagcagaagcccatattcatctaggcactcaagatctcggagcaggcacagattgtctagatcaagaagtcgtcattcaagcatttctcctagcacactaactctgaagagtagcttggcagctgaattgaacaagaataaaaaggcacgagctgcagaggcagcaagagctgcagaggcagcaaaagctgcagaagctgctaaggctgctgaagcagctgccaaagctgccaaagcctcaaatgcttctacacctaccaaggggaacacagaaactggtgccagtgtctcacagacaaaccatgtgaaggaagtcaaaaaacttaaaactgagcatgcaccttctccttcaagtggtgggaccgtcaaaagcgacaaagcaaaaacaaagccaccgcttcaagtaacaaaggtagacaataatttgacagtagagaaagccaccaagaaaacagttgttgggaaggagagtaaacctgctgctacaaaggaagaaccagtttccactaaagagaaaagcaagccactcacaccaagcacaggagccaaggagaaggagcagcatgtggctttagtgacctctacgttaccgccattacctttgcctcccatgctgcctgaagataaagatgctgatagcttaagaggcaacatttctgtcaaagcagttaaaaaagaagtagaaaagaaactccgatgtctgcttgctgatttaccattgccccctgagttaccaggaggagatgatctttccaagagtccagaggagaagaaaacagcagcacagttacatagcaaacgaaggcctaaaatatgtgggcctcgctatggtgaaatcaaagaaaaagatattgactgggggaaacgctgcgtggataaatttgatatcatcggaattattggagaaggtacttatggacaagtttacaaagccagggacaaagacacgggagaaatggtagccttaaagaaagtacgtctggataatgaaaaggagggtttcccaattacagcaattagagaaattaaaattcttcggcaactcacccaccagagtatcatcaatatgaaggaaatcgtgactgataaagaagatgctttggattttaagaaagacaaaggtgcattttacctggtgtttgaatatatggaccatgatctgatgggactgctggaatcaggcttggttcattttaatgaaaaccatataaaatcttttatgagacagctcatggaaggcctggattattgtcataagaagaactttttgcatagagatattaaatgttcaaatatccttctaaataatagaggacagataaaacttgcagattttggacttgctcgtttatatagctcagaagaaagtcgcccatatactaacaaggtcattactttgtggtatcgtccacctgaattgctcttgggagaagaacgatatacaccagccattgatgtatggagctgtggatgtatccttggtgaactcttcactaaaaaacctatatttcaagcaaaccaggaacttgcacagctagagctaataagccgtatatgtgggagtccatgtcctgcagtgtggcctgatgtaatcaaactgccatatttcaacaccatgaaaccaaagaagcaatatcggcggaagttaagagaagaatttgttttcatccccgcagctgcactcgacttattcgattacatgcttgccttggatcccagtaagcgctgcactgctgagcaggctcttcagtgtgagttcctgcgagacgtggaaccctccaaaatgcctccaccagaccttcctttgtggcaagattgtcatgaattatggagtaaaaagagaagaagacagaaacagatgggcatgactgatgatctttccacaatcaaagcccctaggaaggacctgtctctgggcttagatgacagcagaactaacacaccccagggtgtgctgccacccgcacagttgaaatctcagagcaactcaaatgtagcacctgtaataacaggccctggacagccgttaaaccacagtgaattggcaattcttctaaacctactacaatctaaatcaagtgttaatatggctgattttgtccaagtgttgaacattaaggtaaactctgagactcaacagcagctaaataaaataaaccttcctgctggaattttggcaacaggtgaaaaacagacagatccatcaacaccacaacaggagtcttcaaaatcattgggaggagttcagccttcacagaccatccagcctaaagtggaaactgatgctgcccaggctgctgtgcagagtgcatttgcagtcctcttgactcagttaataaaggcccaacagtccaaacagaaagatgccatgctagaggaaagggaaaatggatcaggacatgaagctccattgcaactcaggcctcctctagaaccgagcactcctggatccgggcaagatgacctcatccagcaccaagacaggaggatattggagctgacaccagaaccagaccggcctcgaattctgcctcctgatcaacggcctcctgaacctcctgaaccaccaccagttactgaggaggacctagattatcggacagaaaaccagcatgttcctaccactagttcttcattaactgacccacatgctggagtgaaggcagccctcttacagctgcttgctcagcatcagccccaggatgatcccaaaagagaaggtggtatcgattatcccacaggagacacatatgtgcccagttcagactataaggacaactttggatcttctttctctgccgctccttacgttagcagtgatggtctaggaagtagctccgctgctgcaccattggaagcacgtagtttcattggaaactcagatattcagtctctggataactacagtactgcttcatctcacactggtggtccacctcaaacttctgcctttactgagtcgtttgccagttcagtagctggatatggagacatttacctcaatgctggtcccatgttgtttagtggagacaaggaccatagatttgaatatagccatggtcctatcacagtcctcacaaacagcaatgacccttccacagggccagagagtactcatcccttgccagcaaagatgcacaactataactatggtggtaacttacaggaaaatccaggtggccctagcctcatgcatggacagacctggacttctcctgcccaaggacctggatattcacaaggatacaggggacacattagcacatcagctggcagaggtcgaggcagagggttaccatactgagtatctgtttttcctcaggcacatcatttttatctggaaagacttttctagctgcaatttcaggcagcaatccaagagacttgaataatattaattcaacaacagctttatttttatgtggaaagggtcttgcatacaatagtgaaaaaaacaaaacaacaaaaaaaatctttgcttaaattcatgctgttcttaaaactagctctattgattgtacatcgtcacagattttagttaacaattttattttgtattcttgcagttttaagtggatgctaacattagggacataatgtttttatggccctgtggcagatcttctgaactatgcacacttgtgcttttttttgtaagtttggaccaacttttatgtaaacaaagctga

SEQ ID NO: 54 - DNA, 1563 bp, Mus musculus
gagcaaatgagaagaggcgggtgggaagaggttcaagggcgggttttctccttgaacctgggctagtatgggtcaagagctgtgtgcaaagaggctacagccaggatgcagttgctaccaccgttcggagggaggggaggcgcacagctgtcagagaagccagcctggaagcaccgagcctgctgtattcgagctaacagaagcatccagttccacggcttcatttcaccccaggggactggaggctgccagtgcccagaagttgaagagtaaaaggccccggagtaacagtgattcttttcaggaagagaatctgaggcaggggttgccatggaagaagagcctcccttttggggcagcctcatcttacttgaacttggagaagctgggtgaaggttcttatgccaaagtttacaagggcatcagcaggataaatggacaactagtagctctcaaggtcatcagcatgaatgcagaggagggagtccctttcacagccatccgggaagcatctctcctgaagggcttgaagcatgccaatattgtcctcttgcatgacattgttcacaccaaagagactctgacattcgtatttgaatacatgcataccgacctggcccagtacatgtctcagcatcctggagggcttcatcctcacaatgtcaggcttttcatgtttcaacttctgcggggcctggcatacatccaccaccagcgtgttctccacagggacctgaaacctcagaacttgctcctcagtcacctgggagagctcaaactggctgattttggtcttgctcgagccaagtccattcctagccagacatactcctcagaagtggtgacactctggtaccggccacctgacgctttgctgggagccactgagtactcctctgagctagacatatggggcgcaggctgcatcttcattgaaatgttccagggtcaacctctgtttcctggggtatccaacatcctcgaacagctggagaagatctgggaggttctgggagtccctacagaggatacctggcctggagtctccaaactgcctaactacaatccagaatggttcccgccacctaaacctcaaagcctgcagattgtctgggacaggctgggtggagttcctgaagctgaagacctggcctcccagatgctaaaaggcttccccagggaccgtgtctcagcccaagaagcgctcgttcatgattatttcagtgtcttgccatcccagttgtaccagcttcctgatgaggagtctctgtttgcagtttcgggagtgaagctaaagccagaaatgtgtgacctttcggcttcctacaggaagagacaccacctagtcggggttaacaaatgttggtgaaaagaaaaggcctgtagccacacggtctccttgtgtcagcttacgacgaagcttcgtgccctatttcatactggatcagagatctgtgttctctctctggctgcctggaatatttaaaacatgatgttcaagacaaggatataatacaggaagagtgcaatgaaaggttattgctattattgttacctaaaaac

SEQ ID NO: 55 - DNA, 2928 bp, Mus musculus
cggccgcgagagtgaaggcttccccgatagaggtgggggactcggcaggggactcagttaatactgcacagttgaacaaatgtatgaaggttccttgccaaccattgagaatttcttcgttgggacattatttccctgcttactgaataacttgtttagacgtttcttttttggtgccatgttctgtggctcacatcaaaagaggagtttgtcttcatgaagattcctaacattggtaatgtgatgaataaatttgagatccttggggttgtcggtgaaggagcctatggagttgtacttaaatgcagacacaaggaaacacatgaaattgtggcaatcaagaaattcaaggacagcgaagaaaatgaagaagtcaaggagacgaccttacgagagcttaaaatgcttcgcactctcaagcaggaaaacattgtggagctgaaggaagcttttcgtcggagaggaaaattatacctggtgtttgaatatgttgagaagaatatgcttgaattgctggaagaaatgccaaatggagttccacctgaaaaagtcaagagctatatctaccaactaatcaaagctatccactggtgccacaagaacgacatcgtccacagagatataaagcctgaaaatctcttaatcagccacaatgatgtcctgaaactatgtgactttggttttgctcgcaatctctcagagggcaataatgctaattatacagagtatgtggctacaaggtggtaccgatccccagaactgctacttggagccccctatggaaagtcagtggacatgtggtcagtgggctgtattcttggagagcttagtgatggccagcccttatttcctggagaaagtgaaattgaccaactctttactattcagaaggtgctaggaccacttccatctgagcaaatgaagctcttctacagtaaccctcgtttccatgggctccggttcccagctgttaaccatcctcagtcattagagagaagataccttggaattttaaatagtgttttacttgacctaatgaagaatttactgaagttggacccagctgacagatacttgacagagcagtgtttaaatcatcctacatttcagactcagagacttttggaccggtctccttcaagatcaacaaaaaggaaaccttatcatgtggaaagcagcaccctgtctaatagaaaccaatccaccaagggtgctgccttacagactcaccacagatccaacagcaaggacattcagaacttaagtgtgggtctgcccagggctgaggaaggcctgcctgcaaacgaaagcttcctcaatggaaaccttgctggagcaactctcagcccaatgcacaccaaaacctaccaagcaagcacccagcctggctcttccagcaaagatctcacaaacaacaacataccacaccttctcagtccaaaagaagccaagtccaaaacagagtttgacttcaatattgacacaaagccttcagaaggtccaggcacaaagtacctcaagtccagcaccagatctcagcagaacaggcactcattcatggaaagctcccagagcaaagctgggaccctgcagcccagtgagaagcagagtcggcacagctatattgacaccattccccagtcctcccggagtccatcctacaggacaaaggccaaaagccatggggcgttgagtgactccaagtctgtgagcaacctttccgaagccagagcccaaatcacagagactaataccagtagatacttcccatccagttgtttggacttgaactctcccaccagcccaacccccaccaggcacactgatacgagaactttgctcagcccttccggtcgaaataatagaaatgaaggcactctggactcacggcgaaccaccactagacactcaaaaaccatggaggagttgaagctgcctgaacacatggacagcagccattcgcattcactgtctgcacctcatgaatcattttcttatgggctaggctacaccagccccttctcctctcagcagcgtcctcacaggcattccatgtacgtgacccgggacaaagtgagagcgaaaggccttgatggaagcttgagcataggacaagggatggcagccagagccaacagtttgcagctcttatcaccccagcctggagaacagctccctccagagatgactgtggcaagaccttctgttaaagagtcctcccgagaaggcgcctcttcattccacacccgtcagaagtctgagggtggagtataccatgacccacactctgacgacggcacagctcccaaagaaaatcggcatctgtacaatgaccctgtcccaaggagagttggtagcttttatagagtgccatctccacgaccagacaattctttccatgaaaataatgtgtccactcgagtttcttctctgccatctgatagcagttctggtacaaatcattcaaaaagacaaccaggatttgatccatggaaaagtcctgaaaacattagtcatgccgatcaactcaaagaaaaggagaagcaaggttttttcaggtcaatgaaaaagaaaaagaagaaaactcaaacagtgcccaacactgacggtcctgatctattgaccttacagaaagccattcattcttctagcactgcaagcagcagaccaaaggagtggcgacctgagaagctctcagatctacagacccagagccaaccactaaaatctcttcgaaagctgttgcatctgtcttcatcaaccaatcatccagcttcttcagatcctcggttccagcccttaacagctcaacaagccaaaaattccttctcagaaattcggattcaccctctgagtcaggccactggtgggagcagcaacatccggcaggagcctacaccaaaaggcagaccagcccttcagttgcca

SEQ ID NO: 56 - DNA, 1029 bp, Mus musculus
atggaaaagtatgaaaagctagctaagatcggagaagggtcttatggcgttgtattcaagtgcagaaacaaatcttctggacaagtagtagcgatcaaaaaattcgtggaatctgaagatgatcgtgtcgttaggaaaatagccctgcgggaaatccgtatgctgaagcagttgaaacacccaaacctcgtgaacctcatcgaggtgttcagaagaaagagaaagatgcatctagtttttgagtactgtgatcacacactgttaaacgagctggagagaaacccaaacggagtttctgatggagtgattaaaagtgtgctatggcaaacccttcaagcccttaacttctgtcacaagcacaattgtattcatcgggatgtaaaacctgaaaacatcctaataaccaagcaagggatgataaagatttgtgactttggatttgcacgaattctaattccaggagacgcctacacagactatgttgccaccaggtggtaccgagcccccgaacttctcgtgggagacacgaagtacggttcctctgtagacgtgtgggccgtcggctgtgtttttgcagagctcctgacgggtcagccactctggccgggaaaatccgacgtggaccagctttacctgatcatcaggacgttggggaagctgattccaagacaccagtctatctttaggagtaaccagtttttccgcggcatcagcatacctgaaccagaggacatggagactcttgaagaaaaattctcaaatgttcagcctgtggctttaagtttcatgaagggatgcctgaagatgaatcctgatgagaggctgacctgtgcccagctgctggacagtgcctactttgagtcttttcaagaggatcaaatgaaaagaaaagcccgcagtgaggggagaagccgaaggcgccagcagaatcaactgctgcctcttattcctggaagccacatctcccccacacctgatggaaggaaacaagtcgtccagttaaagttcgatcatcttccaaacatttag

SEQ ID NO: 57 - DNA, 1776 bp, Mus musculus
agtaacacggcgttcccttttgtggacacaaaggggaagaggaacacagttaacttcccccagattggcaacaaagtcccatcaaaggggcccatgcagtatcagaggtgggtctactgggtcaactcgatgacctatgacccccaagagaatcaatcctttattataacttatttccctggacaggaaaatcaaattcataatcaagtgctatcctctgaactcaagacttcagaaatacctttcaacattaacaccaaagcccaagacaccaagccacacccagaactacaaaagaagcacaaagtccctcttacagtagcagaggccctaaagttctttaagaatcagctgtccccttatgagcaaagcgaaatcctgggctactcagagctgtggttcctgggccttgaagccaagaagctcaacgtggttccagagaagttcagcaagacaagctttgatgatgagcacggttcctatatgaaggtcctgcatgaccacattgcctaccgatatgaggttctggagatgatcgggaaagggtcctttggacaggtggccaagtgcttggatcacaaaaacaatgagttggtggccctgaaaatcatcaggaacaaaaagagatttcaccatcaggctctggtggagctgaagatcctggaagccctcagaaggaaggacaaagacaacaaccacaatgtggtccacatgaaggatttcttctacttccggaatcacctctgtatcacctttgagctcctgggaatcaacctgtatgagttgatgaagaacaacagctttcatggcttcaatctgtccatagttcggcgcttcaccttttccattttgaaatgcttacacatgctttatgtagagaaaatcatccactgtgacctcaagccggaaaatattgtgctataccagaggggccaagtcactgttaaagttattgactttgggtcaagctgttatgaacaccagaaagtgtatacgtacatccaaagtcgtttctaccgatccccagaggtgattctgggacacccctataacatggccattgacatgtggagcctgggctgcatcatggcggagctgtacaccggatacccactgttccctggggagaacgaggtggagcagctggcttgcatcatggaggtgctgggcctgccacctgcccacttcacccagacagcctccaggagacaggtattctttgaatgctgtttctctgaagattccaaaggtcttcccaaaaatataaacaacaacagagggggaaaaagatacccagattccaaggatctcacgatggtggtgaaaacctacgattccagcttcctggactttctcagaaggtgtttggtgtgggagccttctctgcgcatgacccccgagcaggccctcaagcatgcctggattcacgagccgaggaaattcaaaccacggcccaagccacagatattaaggaagcctggtgccagtatttcctctgagataagcacggaaaaggctgaagagcaacaggccagcaaaggcaaaaaagatgaggctaccaaagaaactacagacaaattgaaggacgaagctgagaagcaccttgagaattcgggcaaacagcagagctctgtggagcacacagcagacaccatccagctgcctcacctaacagaagcttctggaaagtcagagactgttgctgggtcagagatgtccgcagaacagcagagcacctcctcccccaagagcacaaacatcttaccacccatcgtg

SEQ ID NO: 58 - DNA, 1929 bp, Mus musculus
atggccaccatccagtcagagactgactgctacgacatcattgaagttctgggcaagggcacttttggagaggtggccaagggctggcgtcggagtacaggtgaaatggtggccatcaagatcctgaagaacgatgcgtaccgaagccgcatcatcaagaatgagctgaagctgctgcgctgcgtgcgaggcctggaccctgacgaggcccacgttatccgcttccttgagttcttccacgatgccctcaagttctacctggtcttcgagcttttggagcaaaacctctttgagttccagaaagagaacaacttcgcaccccttcctgccaggcacatccgcacggtcacactgcaggtactaagagcgctggcccggctcaaggaactggccatcatccacgctgacctcaagcctgaaaacattatgttggtagaccagacgcgctgccccttcagggtcaaggtgatcgactttggctcggccagcatattcagtgaggtacgctatgtgaaggagccttacatccagtcccgcttctacagggccccagagatcctgctggggctgcccttctgtgagaaggtggacgtgtggtctctgggctgtgtcatggccgagctacatctgggctggcctctctacccaggcaacaatgagtatgaccaggtgcgctacatctgtgagacccagggcttacccaagccccatttgctgcatgcggctcgcaaggctcaccacttcttcaaacgcatgctgacatgggagtcgcacgaacgcatcagtcccagtgcggccctgcgtcaccccttcgtgtccatgcagcagctgcggagtgcccacgaggccacccgctactaccagctgtcgctcagaggctgtcggctgtccctgcaggtggatggcaagccacccccacctgtcatagccagcgcagaggacgggcctccctactaccgcctggctgaggaggaggagactgcaggcctgggtggtgtgacaggcagtgggtccttcttcagggaggacaaggctccgggaatgcagagggccatcgaccagctcgatgacctgagtctgcaagaggccagacgggggctgtggagcgacacacgggccgacatggtctctgacatgctggttccactcaaagtggccagtaccagccaccgagtccctgactcaggcccagagcctatcctggccttctacggcagccgattgaccggccgccataaggcccgcaaggccccagcaggctccaaatctgactccaacttcagtaacctcattcggctgagccaggcctcacctgaggatgccgggccctgtcggggcagtggctgggaggaaggagaaggccgcacgacctccacagagccgtctgtcatcccacaacgggaaggagatgggcctggcatcaaagacaggcccatggatgccgagaggccaggccctgagctctttgatcccagcagctgtcctggagagtggctgagtgagccagaatggaccctagagggcatccgggggtctcgagctcaagggctcccagctcaccatccccacccccacgggccacccaggaccaccagctttctgcagcatgttggagggcaccactgatggggactcacccctatcgtttcatggggtctgagctagctgggctggcgttccccttcttgatccgaaatggcaccttagagccatcctctgaacctacagattattcttacagaaaaatagaaatccagatgttcctattcccctgcccctggcacatgcctgtatcccaccctaaatgttggaggtcgtcagggtctggcctgaggccctgaggccagtgagttgggaagaggctgcaccctggtggccatgactgtgcctgggcctgcctgcctctgtgtatttcaataaataactgtt

SEQ ID NO: 59 - DNA, 2206 bp, Mus musculus
atggctgagaaaggtgactgcatcgccagcgtctacgggtatgaccttggtgggcgcttcattgacttccaaccccttggctttggggtcaacgggctggtgctgtcagctacggacagcagggcttgccggaaggtggccgtgaagaagatcgttctgagtgacgcccgcagcatgaagcacgcgctccgagagatcaaaatcatccggcgcctggaccacgacaacattgtcaaggtgtacgaggtgctgggacccaaggggagcgatctgcagggcgagctcttcaagtttagcgtggcctatatcgtccaagagtacatggagactgacctggcgtgcctgctggagcagggcacgctgactgaggaccacgccaagctgttcatgtatcagctgctccgtgggctcaagtacatccactctgcgaacgtgctgcacagagacctgaagcccgccaacatcttcatcagcacggaggaccttgtgctcaagattggggatttcgggttggcaaggatcgtggatcaacattactcacacaagggttatctgtcagaagggttggtgacaaagtggtaccggtctccgagactgctcctgtccccaaataactacacaaaagccatcgatatgtgggcagctggctgcatcctggcagagatgctcacggggaaaatgctcttcgctggggctcacgagctggagcagatgcagctcatcctagacaccatccctgtggtccgggaggaagacaaggaggagctgctcagggtgatgccgtccttcgtcagcagcacctgggaggtgaagaggccactgcgcaagctgctcccggacgtcaacagtgaagccattgactttctggagaagatcctgacctttaaccccatggaccgcttaacagctgagatggggcttcagcatccttacatgagcccgtactcgtgccccgaggatgagcccacctcacaacaccctttccgcattgaggacgagatcgacgacatcgtgctgatggctgccagtcagagccagctctccaactgggacaggtatcctgtgagcctgtcctcagatctggaatggcggcctgaccggtgccaggacgccagcgaggtgcagcgcgatccacgtgcaggctctacaccgctggcggaggatgttcaggtggacccacgcaaggactcacagagcagctccgagcgcttcctggagcagtcacactcgtccatggagcgcgccttcgaggccgactatggacggtcctgcgactacaaagtggggtctccatcctacctggacaagctactgtggcgcgacaacaagccccaccactactcggaacccaagctcatcctggacctgtcgcactggaagcaggcggccagcgctccccccagggctgcagtagcagcagaccctgtgtcacgtgaggatgagccagcaagcctctttctggagattgcacagtgggtcaagagcacacaaagtggctctgagcgtgccagtcctccccctgatgccccagagccccgtctctctgcctcacccccgggacacccaacacccatcgatgggggtgccagtccccagttcgacttagacgtgttcatctcgcgtgccctaaagctctgcaccaaacctgaggacctcccggaaaacaaactgggcgacctgaatggcgcgtgcatctctgagcaccctggcgacctcgtgcagacagaggccttctccaaagaaaggtggtgagcacagaaggggtgcgggaaaactcccggagcaggatccccatccagaaagctggaccagttgcgtgctccctcgcactccttcatcccctctctgctgcgttggggttagcagaacacacgcggatccggggagaaagaagaatgtccatttcttaaactgccttaataactagcctttaacctctgggagcgggtttgaaccgagcctggctgggagccgtcagtttcccatcgaagggaaggtctgttgagattgtgtgcaagggaagaaagggatctagggcagcagtctacgccctgcaagagtagaggggtcagaaacagcttgcagacagtttccaagccacgtgacccacttagtctcaaatggacatttgggcccagagaagccgttacgaccaccagcctaatggtgtcagaagcctgtgtcccaagcccctgcccctggacca

SEQ ID NO: 60 - DNA, 3345 bp, Mus musculus
cgcaggtttaaacttaaacgatcgctccccgaggaggaggggacccgccgcgcgattgacagtctattcctgcaggcgccgtccctcagcccccaccccacggccggattcccggggctctgctcagggctgaaaccggagaagaaatccttagatctcttttctttacaacaaatacgaacctagaaaccatcggcattttgccttggcatttcatattggaaagatgaagaagtttttcgactccaggcgggagcaggggagctctggcctgggttcaggctccagcggaggagggggcagcagctcaggcctgggcagtggttacatcggaagggtcttcggcatcgggaggcagcaggtcaccgtggacgaggtgttggcggaaggtggattcgctcttgtctttctggtgagaacaagcaatggggtgaaatgtgccttgaaacgtatgtttgtcaacaatgaacatgacctccaggtgtgcaagagggagatccagatcatgagagacctatcagggcacaagaacattgtgggctacattgattctagtatcaacaatgtgagcagcggcgacgtctgggaagttctcattctcatggacttctgcagaggaggccaggtggtaaacctgatgaaccagcgtctccagacaggcttcacagagaatgaagtgctgcagatattctgtgacacctgtgaagctgtggcccgcctgcatcagtgcaaaactcccattatccaccgggacctgaaggttgaaaatatcctcttgcatgaccgaggccactatgtcttgtgtgactttggaagtgccaccaacaaattccagaatccacaggccgagggagtcaatgcagtagaagatgagattaagaaatacacaacgctctcctatcgagccccagaaatggtcaacttgtacagtggcaaaatcatcactacgaaggcagatatttgggctctaggctgtttgttgtataaattatgctacttcactttgccgtttggggagagccaggtggcgatttgtgacggaagcttcacaattcctgataactctcgttattctcaagatatgcactgccttattaggtatatgttggaaccagaccctgacaaaaggccggatatttaccaggtttcatacttctcatttaaactactcaagaaagaatgccccgttccaaatgtacagaactctcccattcctgcaaaacttcctgaaccagtgaaagccagtgaagcagctgtgaaaaagacccagccaaaggccagactgaccgatcccattcccaccacagagacttcaatcgcaccccgccagaggcctaaagctgggcagactcagccaaacccaggcatccttcccatccagccagccctgactcctcggaagagggccactgttcagcccctacctcaggctgcaggacccagcaatcagcctggacttctacccagtgtttcccaacctaaagcccaagccacacccagtcaacctcttcagtcatctcaacccaagcaaccacaagctccacccaccccacagcagacacctgctacccagacacaaggtttgcccacccaggcccaggccactccccagcaccagcagcaacacctcctcaagcaacagcagcaacagcagcaacagcctcagcagcctacagcaccaccacagcctgcaggcaccttttaccagcagcagcagcaacagcagcagcagcaggctcagactcagcagtttcaggcagtacatccagcagcccagcaaccagtcactgctcagttccctgtggggtcccagggaggtgctcagcaacagctgatgcagaacttctaccaccagcagcaacagcagcagcagcagcagcagcagctgatggctcagcaggctgccctgcagcagaagactgctgtggtagtaccacagtctcaggcacagcccgccacagccccacaggcagctgctgcccaggagcctgggattcaagccccagtgagacaacagccaaaagttcagaccactccacctccaaccatccagggacagaaagttggatctctcactcctccatcatcacccaaaacccaacgtgctgggcacagacggattctcagtgatgtaacccacagtgcagtctttggggttcctgccagcaaatcaacccagctgctccaggcagctgcagctgaggccagtctcaataaatctaagtctgcaaccaccactccctcaggctctccacggacttcacagcagaatgtctccaatgcttcagaaggctccacatggaatccttttgatgacgacaacttctccaaactcacagctgaagagctgctaaacaaggactttgccaagcttggggaaggaaagctgcctgagaagcttggtggctctgcagagagtttgatcccaggcttccagccaacacaaggagatgccttcaccactccttctttttctgctggaactgctgaaaaaaggaaggggggccaggctgtggactctggcatcccacttctaagtgtgtctgatcccttcattcctcttcaagtacctgatgctccagaaaaactaatcgagggactcaaatctcctgacacttctcttctgctccctgacctcttgcctatgacagatccttttggcagcacttctgatgctgttattgacaaagctgatgttgctgttgagagtctcatacctggactggagccacctgttgctcagcgcctcccatctcaaacggaatctgtgacctcgaaccgcacagactctctcacgggggaagactctctgcttgactgctctctgctttctaaccctactgctggccttctggaggagtttgcccccatagcactctctgctcccactcataaagctgcagaagatagcaatctcatctcaggttttggtgttgctgagggctccgaaaaggtggcagaagatgagtttgaccctattcctgtactaattaccaaaaacacacaaggtgggcactctaggaacagcagtgggagctctgagtccagtcttcccaacctagccaggtctttgctgctggtggatcagctcatagacctgtagccgtgagccaggagcagacacagttctgtaaccttcatgccgtaatacacattttcattacggagttatgagaaaaaaatgatttttttttaaatctgcaaataaggggccctcaagctcctttctcctaccccttgccttctcctatagaaatgataaggaaagaaaaatctctgaccctccagatccattccttggccggctcctcttgttagtttgctgtgtgatgttggagcggccgc

SEQ ID NO: 61 - DNA, 5590 bp, Mus musculus
ggccgttcccctctcctcagcagtagctctatggtttcagggcggcaacgtgcagcgtccttaccttgagcctgtgcagttgccctcaccccggaatccatagtcactgtgacgaggcgggaggacttgggcgacaggtagcctcccagtcccacacgctgcgggtccgcgcctggccaagccacctcgacctgtgaagttgggggcggtacccagcaactccccctgtgcagccgccgtttccaaggggtcaggaaccgctgtgtttgtttcgtccgcgtagccagggcgggtcgcggagtactgtgcctgacccgacggtggcaagtctgacgcgtcagccagagaccggtgcccggtgtaggagtcgcagcctgggctgtgagcggctgctgggtagacagacttgctttctcttacagcatgtcatttccaaaatgcatcgtggtgcttctgccttaagtcctataggaagacactgccgccactagaccggtgcttatggtcgccactgttattctgactcaggtcccgtgtcattgagcatatgtatgaaaatgccttaggagggaaccatggagaagtatgtgagactgcagaagattggagaaggttcatttggaaaagctgttcttgttaaatcgacagaggatggcagacattatgtcatcaaggaaattaacatctcaagaatgtctgataaagaaaggcaagaatcaaggagagaagttgctgtattggcaaacatgaagcatccaaatattgtccaatataaagaatcatttgaagaaaatggctctctctacatagtaatggattactgtgaaggaggtgatttgtttaaacgaataaatgctcagaaaggcgctctgtttcaagaagaccagattttggactggtttgtgcagatatgtttggctctgaagcatgtacatgatagaaaaattcttcaccgagacataaagtcacagaacatatttctaaccaaagatgggacagtgcagcttggagattttggaattgctcgagttcttaatagtactgtagagctggctcgaacttgcataggcactccatactacttgtcacctgaaatctgtgaaaacaagccttataacaataaaagtgacatttgggctttgggctgtgtcctttatgagttgtgtacacttaaacatgcatttgaagctggaaacatgaaaaacctggtactgaagataatctccggatcctttcctccagtgtctccacattactcctatgatctccgcagcttgctgtctcagttatttaaaagaaatcctagggatagaccatcagtcaactccatattggagaaaggttttatagctaaacgaatcgaaaagtttctctcccctcagcttattgcagaagaattttgtctaaaaacactttcaaagtttggaccacagcctctcccaggtaaaagaccagcatcaggacaaggtgtcagttcttttgtccctgctcagaaaatcacaaagcctgctgctaaatacggagtgcctttaacatataagaagtatggagataaaaagttacttgagaaaaaaccacccccaaaacataaacaggcccatcaaattcccgtgaagaaaatgaattctggagaagaaaggaagaaaatgtctgaggaagcagcaaaaaaaagaaggttggaatttattgagaaagaaaagaagcaaaaggatcagattaggttcctgaaggctgagcagatgaagcggcaagagaagcagcggttggagaggataaatagggccagggaacaaggatggaggaatgttttaagggctggtggaagcggtgaagtaaaggcttccttttttggcattggaggggctgtctctccatcaccgtgttctcctcgaggccagtatgaacattaccatgccatttttgaccaaatgcagcggctaagagcagaagataatgaagcaagatggaaggggggaatctatggtcgatggctcccagaaagaggagttccacctggagttcgtccaggatttcccagtgaggcttcaggtcactaccattcccctgatgctggtgctattaggaaaactctgaaaagactgaaggccgtgtctaagcaagccagtacaaacaggcaaaaaggacacttagctgtagagagagccaaccaagtggaagaattcctacagcgtaaacgagaagctatgcagaataaagcccgagccgaaggacacggactcctgcaaaacctggcatctctgtatggaggcaggcccagctcttcaagaggagggaagccaaggaacaatgaggaagaggtggtttatttggcaagactgaggcaaataagactacaaaattttaatgagcgccaacagattaaagccaaacttcgtggtgagaataaagaagctgatggtaccaaaggacaagaagcaactgaagagactgacatgaggctcaaaaagatggagtcacttaaggcgcaaacaaatgcacgtgctgctgtactaaaagaacagctggagcgaaaaagaaaggaagcttatgaaagagaaaagaaagtatgggaagaacatttggtggcgagggtaaaaagctcagatgttcctctgcctttggaacttcttgaaacaggtggttctccatcaaagcagcaggtgaagcctgtcatttctgtgacttcagctttgaaagaagtgggcctggatggaagtttaactgatacccaggaagaagaaatggaaaagagtaacagtgctatttcaagtaagcgagaaatcctgcgtaggctaaatgaaaatcttaaagctcaagaggatgaaaaggaaaagcagcatcactcaggttcttgtgagaccgttggtcacaaagatgagagagagtatgagacagaaaatgccatttcctctgatcgcaagaagtgggagatgggaggtcagcttgtgattcctctcgatgcagtgacactggatacatccttctctgcaaccgaaaaacatactgtgggagaggttattaaattagattctaatggctctccaagaaaagtctgggggaaaaaccctacagattctgtgctgaagatacttggagaagctgaattacagctacagacagaactactagaaaacacatcttttaaaagtgaggtttatgctgaagaggagaactacaaacccttacttactgaagaagagaatctgcagtgcatttcaaaagaaataaatccatcagctactgttgattctactgaaacgaaaagtccaaagtttactgaggtgtctccacaaatgtcagaaggaaatgtggaagaacctgatgatttggaaacagaagttctacaagagccaagtagcacacacacagatgggagtttgccacctgttcttaatgatgtgtggactagagagaaggaagcagctaaggaaactgagttggaagataaggttgctgtgcagcagagtgaagtttgtgaagatagaattccagggaacgtggaccaatcctgtaaggatcagagagatcctgcagtagacgattctccgcagtctggctgtgatgtagagaagtcagtacagccagaatcgattttccagaaagtggttcattctaaggacttgaacttagttcaggcagttcattgctcaccagaagaaccaattccaattcgatctcactctgattctccaccaaaaactaagagcaagaattccttactgattggactttcaactggtctgtttgatgcaaacaatccaaagatgctgaggacctgctcacttccagatctttccaagctgttcagaaccctaatggacgttcccactgtgggggacgttcatcaagacagtcttgaaatcgatgagctggaagatgaaccaattaaagaagggccttctgattccgaagacactgtatttgaagaaactgacacagatttacaagagcttcaggcctcaatggagcagctgcttagggagcaaccaggtgacgaatacagtgaggaggaagagtctgttttaaaaagcagcgatgtggagcagacagcaagagggacagatgccccagacgaggaggacaaccccagcagcgaaagcgccctgaacgaggaatggcactcagataatagtgacgctgagaccactagtgaatgtgaatatgacagtgtctttaaccatttagaggaactaagacttcacttggagcaagaaatgggctttgaaaagttctttgaggtttatgagaaagtaaaggctattcatgaggatgaagatgaaaatattgaaatttgttcaacaatagttgagaatattttgggcaatgagcaccagcatctctatgccaagattctgcatttagtcatggcagatggagcctatcaggaagataatgatgaataatcctcaggacattctttaatagtcaactgtaagaacacatttgaacttggctcataatacaagcttcctgggaaatagagattatttatgagaaataccagatttaagatgggcatgcttattgcatgaaaaaaattaagaagtgtgatatttttcctcacgttttatctaccttattttgtttattggattcttcagctaactctcatagaatgtatgtttctttaaatcacctcaccaaagcattgagtcaactgaaaatttattgtgcaataaggaactacttttagcaactgtctttctgtggaagagttggctatatcaaaaaaggcctgcttttggtgtttcatttaaatttcagcatgactttttttttttctgtctaacattttttatcctggctagcagttcacattaaataattcttgtcaagggctctattcaagtatctacatttagaagatgaaattctagccttgaagtttgtattctcgagttattttcaaccactggatctctccctgagctagcccgatgaaaacaggctatagaagcaatcctaaaaatcattgaaagatttaattttgaaggaatagcaaagttatatttcctgacacttgaaagttccctgattcttctgtttctctttatagaccagaaacgctgtatctaaaaatcaggctataaatttaaacctagcatatagcataaaattgccattttggtttttagctcctcgcatacatgtgcctccgtggtcacctgtgttaaaaaggagagagggccctttttcttttggcactgtgacaatttagtaactactgtggggaagtgtttgccttttattttcagtgtgaggatttaaccaggttattacaatgatggtcacatagtttcagttatgtgaacctatatatagaaacagttatagtttcagaatttgccaagtatacattgtgtcattctctacagtccaggtgttcctaataaaataaaagcagaaatgtgtgctttttggtaccaatcagcctgattggtgtaagctgtcatctgaaacatggaatctttccttgtagcactattagtactgtgttgactttattatgtatattatttctaacatccaaaagtaaatagctgatttttatatttttattttgtactattaaatttttattatgtacctg

SEQ ID NO: 62 - DNA, 2898 bp, Mus musculus
  misc_feature (893)..(1282): n is a, c, g, or t
  misc_feature (1643)..(1732): n is a, c, g, or t
aggcgtctgggaggcttagcggctggagcaccgattcttccatgctcactgcttaacgcccgccgagcaggaagttctgacgcctggagccatggataactttcacctgattaagatcattggggaaggcacctttgggaaggtgtacttggctaaagataaatcagaaagcagtcactgtgtcataaaagaaatcagtttgacaaaggaaaaagaggcctcaaagaacgaagtgattcttctggctaggatggagcatcccaatatcgtaaccttcttcagctcgtttcaagagaacggcaggctgtttattgtaatggaatactgtgatggaggggatctcatgcagaggatccagaggcagcggggagtgatgttcagcgaagaccagatcctgtgttggtttgtacagatttctctaggactgaagcatattcatgacaggaagattttacacagggacataaaatctcagaatatttttcttagcaagaatggaatggttgccaagctcggggactttggaacagcaagaacactgaatgactccatggaacttgctcaaacatgtgctgggacaccttactacctgtccccagagatctgtcagaacaggccatacaacaataaaacggacatctggtctcttggctgtgtcttatatgagctctgcacactcaagcatccttttgagagcaacaacttccaccatctggttctgaagatttgtcaaggacgtgttgctcccatatcaccccacttctctcgtgacctacagtccttgatacctcagctcttcagagtgtctcctcaggaccggccatccgttacgtcccttttgaaaagaccctttttagaaactctcattgcccgatccttgtatcctgaggtcnnnnnnnnnnnnnnnnnnnnnnnnnnnnnnnnnnnnnnnnnnnnnnnnnnnnnnnnnnnnnnnnnnnnnnnnnnnnnnnnnnnnnnnnnnnnnnnnnnnnnnnnnnnnnnnnnnnnnnnnnnnnnnnnnnnnnnnnnnnnnnnnnnnnnnnnnnnnnnnnnnnnnnnnnnnnnnnnnnnnnnnnnnnnnnnnnnnnnnnnnnnnnnnnnnnnnnnnnnnnnnnnnnnnnnnnnnnnnnnnnnnnnnnnnnnnnnnnnnnnnnnnnnnnnnnnnnnnnnnnnnnnnnnnnnnnnnnnnnnnnnnnnnnnnnnnnnnnnnnnnnnnnnnnnnnnnnnnnnnnnnnnnnnnnnnnnnnnnnnnnnnnnnnnnnnnnnnnnnnnnnnnnnnnnnagtccatggtctgctgcctaccttcagaggaaatttgaagctcagcaatataagttaaaagtggaaagacaattgggtcttcgtccatcttctgtggaaccacatccaaacgagggagaaaagctacaaagtcattgggaggagactaaattccaggagcttcaatacaggaagaacaaaatgaaggaccaggaatattggaaacagctggaagaaatccgccaacagtaccacaacgacatgaaggaaattaaaaagaaaatggggagagagctgaaggagagtgcaaacctcagtcatagaacctatttggttaagaggagtaacctgtcctcccgccctgatgcacctgaggaagaannnnnnnnnnnnnnnnnnnnnnnnnnnnnnnnnnnnnnnnnnnnnnnnnnnnnnnnnnnnnnnnnnnnnnnnnnnnnnnnnnnnnnnnnnaagagagtggtaaagtttgaaatcagcctagacaagtgtatttcagaggaagacaccgtccaggagaatgaggcagtggataaactaaatgctactttaagctttgaagatggcacgaagtttcaggagcacagatgtaaggaggaacatgaagactatacagacagagcctttgaagaactctgtggcccagaagcagagggtttctttcaggatgtcattgccgcagagaacaggaggcagtgggatgccggggcacctcacactctgctgcgaataatggcaatggcagatgtcacctccacctgccccaccatgccggatgatggccaagtgattgtgatggaaggcagtgtagagaatgggaagcagtggtggctggatgtgccagggaccccgtgtgctttggcagcagagtgtgcctgcagtggctcattgtctgccagtaaaggagaaaccgtaatgatcaaaccacagcttcctaaagaagaccaggaaaaggtagaaatagccacgggcatcatggtggatgatgaacagctggaaccaggatcggatgaagatgacatgcaggaaggcagggggatcaagaattcaatgccatcttcagctacaagcaagatcaaggccagtccaggctgcatggcatcctgccccaactctgtcaccccaccacccctgcaaaggaaaatttgaagaatctgaagatgagctgaggagtgaaataatagaatccctagaaaaacttgcagcttccacagaagaagcggaacaggctcccagctcctctaagaatgcagaggagccaggagagaaagaaaagacaaacttgccagtcaagaaactccagtgaaggtctggacgctggttttggcctgtttgatctgtgtggctaagaccaaggttcatcaaatgccagtcatgacgtgcaagtgtgaacaatcttctgttccccatgcgtggggatccatgtccttaaagaaaaatccgctgtcttactgatttcacacacttcgtcctgtccatgctcttggggggcaactctgatgaatgctgattttagctttcattccatctatcaaactgaaacgctttgttcttatttccatgtgtttgtcattagaataaaactcataagaaaataaacagctctggctttgtatggc

SEQ ID NO: 63 - DNA, 3336 bp, Mus musculus
atgcccgatcaagatacaaaggcgaagagcacagagaaaaccgctgataagcaacaagggaccaccaccagggactattcagatcttaaaagacttcggtgcctgttgaacgttcagtcaagcaaacagcagcttccagccattaactttgacagtgcccaaaataacatgacaaagtctgagccaaccatcaggacagggggacatagagctcgtggtcaatggcatgagtccacagaagcagttgaacttgaaaattttagtataaactataagaatgaaaggaatttcagcaaacatccacagcatcagttatttcaagagatcttcacagctctggtgagaaacagacttatatgcagagagtgggttaatcgtgctccatccattcattttctgagagtgttaatttgtctgaggctgctgatgcgggatccatgttatcaggaaatactccataaattgggtggtattgaagaccttgctcagtacatggagatcgtggccaacgagtacctgggctacgctgaggagcagcactgtgtggacaagctggtcaatatgacgtatatttttcaaaaacttgctgctgtgaaagaccaaagagaatgggttactgcaagtggagcccacaagacattagtgagtttgcttggtgcccgagacaccactgtcctcttgggtgctctgctggcactggccagcttagcagagagttcagagtgtagggagaagatcagtgaactcaacgtagtagaaaatctgttgatgattctgcacgaatatgatttactctccaaaagactcactgccgagctcctgcgcctgctttgtgctgagccccagatcaaggagcaggtgaaactctatgaagggatccccatcctgctcagtctgcttcattctgatcacttgaagctgctgtggagtgtgatctggattctggtccaggtgtgtgaggacccggagactagtgtggaaatccgaatctggggtggcatcaagcagctccttcatattttacaaggagacagaaattttgtttctgaccgttcttccatcggaagcctgtccagtgcaaatgccgcaggacgcatccagcagcttcatttgtcagaagatttaagccctggggaaatcgaggaaaatactgtctctctccaagcagcctgctgtgctgccctcaccgagctggccctcaatgataccaatgcccaccaagtggtacaggaaaatggtgtatatacaatagcaaaattaattttaccaaataaacaatcgaatgcagcacaaactaatctactacagtgttatgctttcagaaccctgaggtttctcttcagtatggaaaggaacaggccactctttaaaagactttttcccaccgacctgtttgagaccttcattgacataggacattacgttcgtgatattggtgcttataaggacttggtatcacagttgaatttactattggaagatgagctgaagcaaattgctgagaatattgaaagcatcaatcagaagaaagcgcccttgaagtacataggtgactatgctgtgttggaccaccttggaagtggagcttttggctgtgtttataaggttagaaagcgtagtggtcaaaatcttttagcaatgaaggaggtcaatttgcataacccagcatttggaaaggataagaaagaccgagacagcagtgtcaagaacattgtttctgaattaacaataattaaggagcagctttatcatcccaatgttgtacgttattataaaacatttttggaaaatgacaggttgtatatcgttatggagctgatagaaggagccccacttggagagcactttaattctttgaaggaaaaacatcaccatttcagtgaagagcgactgtggaaaatatttatacagctgtgcttagctcttcggtatctgcacaaggagaagaggattgttcacagagatctcacgccaaacaacattatgctgggagataaggacaaagtgacagttactgactttggcctggcaaagcaaaaacaggaaagcagtaagcttacatctatggtgggaacgatcctctattcttgcccagaggtcctgaagagtgagccatatggagagaaggccgatgtctgggctgctggctgcatcctttatcagatggcgactctaagtcctcccttctgtagcaccaacatgctctccttggctactaaaatagtggaggctgtatatgagccagtgccagaaggtatctactctgaaaaagtgacagataccattagaaggtgcctcactcctgatgcagaagcccgtccagatattgtagaagttagttccatgatatcagatgtcatgatgaagtatttagacagattatccacatcccagctagccttggagaggaaactggaaagggagcggaggcgcacacagagatactttatggaagccaacaggaatgctgtcacatgtcaccatgagctggctcttctgtcccaggagacctttgagaaggcaagcctgagcagcagtagcagcggggcagccagcctgaaaagtgagctttcagagagcgcagagctgcctggagagggctgccacatcccctgcgggaaggaggaggacagggtctgtgaggaggtgctgtcagaagacaacttccagctggagagtgtggagaaagacctgtattctgagctagacgatgagctggacgtctcggacaactgtagcagctccagttcaagccccctaaaggagtctacattcagcattttaaagcgaagtttcagtgcttcgggaagagaaaggcactcacaggcaagggacttcattgctggactaggatcaagaccaagaccagggccacagatgagcacctttgtggtagagtcagcatctgcaggcatcgctgtatcccagcggaaagtgcggcagatctgcgaccccattcagcagatcctgatccagctacataaagttatctacatcacgcagctccctccagctctgcaccatgatctgaagagaagggttatagagagattcaagaagtccctgttcagtcagcagagcaacccatgtaacctgaaatctgaaattaagaagttgtctcaggggtctccagaacccatcgagctgaactttcttacctcagattatcattcacttcgccattcacgagctgcaaacaactggtccccaagtgaccccacaggttcacccagcagctttgaagtggaagagggagtcacatatgagcagatgcagactgtgattgaagaagtcctagaggaaagtggctattacaactttacaactaagaggtga

SEQ ID NO: 64 - DNA, 1145 bp, Mus musculus
agaaagggatcagacaagccttggagaaggcgaagtctggagctctgagcccagaaatgccaggcaaacagtcagaagacaagccaatggaagtgtcaactgtggaggatggaggtgatgaaggcctgggaggcctaacggtagaggagctgcagcaggggcaggaggctgctctggccttggaggacatgatggctctgagtgcccagaccctggtccaaactgaggtggaagagctgtacgaggaagtgcgtcccctgggccagggccggttcggccgtgtcctgctggttactcaccgccagaaaggaacacccctggcgctgaagcagctcccgaagcaatccacttccctccgtggcttcctgtatgagttctgcgtgggcctctcacttggcacacattctgccatcgtgacagcctatggcattggcattgagtcagccaattcctacagcttcctgacagaacctgtcctccatggggacctaatcaccttcatccagcccaaggtgggtctcccacagccagcagcccagcgctgtgcagcccaactggcctctgccctggaacacattcactcgcatggcctggtgtaccgggacttgaagccagagaatgtgctggtgtgtgacccagcctgccagcgcgtcaagctgacagacttcggccacacccggccccgagggaccctgctccgactcactgggccacctatcccctacactgcccctgagctctgtgccccaccacccctccccgagggactacccatccaaccttccctggatgcctgggccctaggggtcctgatcttctgcctccttactggctacttcccctgggaccagcccctggtggaggttgaccctttctttgaggactttctcatctggcaggcttctggtcagccccaagaccggccacagccctggtatagcctgtcacctgcagcagacactctcctatgggggctgctagatcctcacccccggaagaggaaccctgtgggctccatcaagagctatctaggccaaccctggaagcagagggaaggggaggctgaggaattggcaacggagctgagagaagatgggtggagaggagggcaggaggctgcaaagggggagcaacctgcatgctga

SEQ ID NO: 65 - DNA, 624 bp, Mus musculus
gagtgaacaaagaccagatcacatgggagagggaggacacggccatggccctgcagcggctagtggagctaacagccagccgagtgacatcagtaagaagcctgtgtgtacagtaccgtctcatccgaaagctaggttccggctcctatggccgcgtgctcctagcccagccacgccaaggaggtcaaactgtggcccttaagctcctccgaagggactcagtcctgagaacaacgttcctgagagaattctgtgtgggccgctgcgtctcttcacatccaggcctactacagaccctgggaaggcccctacagacacctcgatattttgcctttgctcaggagtttgcaccctgtggggatctcagtggaatgctccaggagaagggcctcccagagctgatggtgaagcggatagtggcccagctggctggagccctggacttcctccatggccgggggctagtgcatgcagatgtcaagccagacaatgtgctagtcttcgaccctgactgtaacagagtagccctgggtgacctgggtttgactcgacctgaaggcagcccaacccctgctacccagtgcctctgcccactgcaccacctgaactctgcctcctgctgcc

SEQ ID NO: 66 - DNA, 4505 bp, Mus musculus
gagaagtcagccgcccgcggctgggcaagcactccgcgcagacacgctaaagacaatgctccgaggcgtccggcggggcaacggactgctgggtcaccgacggcgaggctgcgagaccgcagaccccagggatttgatctggaactcatcgctgcctcctgcaagacggcaatcagaaagcctggcccaagatgaactcgaaccttatcggctcacagtgctccagaccatttgactgaaccccgagagcccaaaaatgtctgcgtgcagcgactttgtggagcacatctggaaacccgggtcttgcaagaactgcttctgcttgcgaagtgatcatcagccaacagctggccatcccaaggctagagccaacagcctacccgctggaactcgcctgcctgccaggcctgagaattgccgcctagacgacgaaggcgtgaatggcttggcctactcaaagcccaccattgctgtaaagcccaccatgatgacttctgagacctccgacttgtggactgaagccagcctgagcgctgaagtcccaaaggtcaattggagacgaaccccaggcaagctcctgctcccgaaacaggaagatgagccaatagtttacctaggcagcttccgaggactgcagaagcctgcaagccctcttgcctgcacagatggcaactctcgttgtcccccagcctataccatggtcggactgcataacctggaggcccgcgtggataggaacactgcctttcaaccagtgagcttccaggaagagaaggctgggagggaagagctgccctcagctcacgagagctttcgccagaagctggctgcctttgcagggatgacatccagctgccccaagggccccaggccctgcacttctccacagcccctgcgggaatccctgccctcggaggatgacagtgaccaaaggtgctcaccctcaggagacagcgaaggtggggagtactgttccattctggactgttgtccagaatccaaagatgctgtgcatagcaccgagggctctggcagacgtggaggggactgctcacccacgtgcagggagcagggaccacgtacaagaccaacagaagaggaaaaacagggtctgagcttccccagagagtgctgtggtcagggatccacagcgaacccgccccgcctgggccccaagaagccatcccttaactctgaggccgccagctcttccgatggtctgtcctgtggcagcagccgcagcggggccagcagccccttcgctccccaccttgagaacgactactgctctcttgtgaaggaaccggcctcagggaagcagcaagacctcagcggccactttctcacctctggcaaatgtgtgggtcaagctgcggaactccagcccgcctcccttcttagggaccctgtgcagcctgaacccatctacgccgaaagcgccaagaggaagaaggcagctccggggcctccgaggcccgagcccaagaaagagcaggtcccagctggccatagccagggccaagtatggacaggtgatacctggattcagaagacaccccctagctggagccaggacagggaaggcgcaaaccctgctcctcaggtggcaaccaccatcactgtcatcgctgctcacccggaagaggaccacaggactatttatctgagcagccctgactctgccgtgggggtgcagtggccacgtgggccttcgaaccaggacttacaagccggtgaagaggagcctttggttgcgcaggggctaacctcaagggagagccatccacataatgtgactgaaaacacggccaaagagaagcctgccattccccccaaactgtccaaaagcagccccggagggtcccctgtgtctcccgcgcccccactgactgaccacagcgacgggaacaccggtggcagcagcgtcggaccccaacttttgtctagagtccctgctaacctaacgtcttcctgccacaccaatggcgttgccactgctggtgactctgccaagtgtcccccaccagccacctcctcttcagtcttggaccagaggcggccaagataccagactggtgcttggagccgccagtgccggatagaagaggaggaggaggtggggcaggagttgagtcaaagttgggggagagagttggaaaacggtaccgcagaccattcaaactcctctacctggcaccgtctccatcccatcgatggcacctctgggcagaacagcaaaactaactctgggatgagcaaatcggcttcctttgcgtttgagttcccaaaggacagaggcagattggaggcattctcaccccctcccccacctccaaagtcaaggcacctgttaaaaatgaacaagagcagttctgacttggaaaaagtgagccagagttctgcagaaagcctcagcccgtccttcagaggggcccacgtcagcttcaccacgggctccacagatagcctagcctcggactccaggccctgcagcgatggaggtccatcatatgaacccacccactcacccaccatcagcgggaaaaagctcttcgctcccgtcccttttccatcaggctccacagaggatgtgtcccctggtggtggtcctgcgcagcctcctcctctgccccagaaaaagatagtgagccgtgccgcctcttcccctgatggcttcttctggacccaaggttcccctaagccacggacggcaagtcccaagctgaacctaagccattcagaaaccaatgtttgtgcccatgacgagcctccttttaactgttccttgaactctggaaaccgttcccaccatgtcttctcctcttctgagcctttggggaaagctttcaaaggcaatgctccctgggccccagctctggggctggcgaacagcaaaggcggctgtgggagccccagtctccagtgcagagcggccacctccacgtcatcatcccagctcagcgtgtccagccaggcctcctccagcagcacccagcttcagctgcacagcctgctgagtagcatcagcagcaaggagggcacctatgccaagcttgggggcctctacacacaatccctggcccgcctagtgaccaagtgtgaagatctcttcatgggtggccagaaaaaggaactgcgcttcaatgagaattactggtcactcttcaagctgacgtgcaacaaaccttgctgtgactcgggggatgcaatttactactgtgccacctgctctgaggacccaggcagcatctatgctgtgaaaatctgcaaaaccccagaacccaaatcagcctcatactgcagcccatctgtgccggtgcatttcaacatccagcaagactgcggccactttgtggcctctgtgccctccagcatgcttgcctcccctgacacatccagcaaagacaccgcgcctgccgtatccccacagccccctgcccaggagcaggactgtgtggtggtcatcacccgggaggtaccgcaccagactgcctccgactttgtgcgggactctatggccagccaccgggcggagcctgaggtttacgagcgccgggtgtgcttcctgcttctgcagctctgcaacgggctggagcacctgaaggaacacgggatcatccaccgggacctgtgtctggagaacctgctgctggcgcactgtaaccctcagagctcccccgggccctctgccactcctaccgtgcccaccaccacatccaggtgcccttctgccgcgcccgcagccaccactgcctgccagggagggcctggtgagaagcagctgcccaggctcatcatcagcaacttcctgaaggccaagcaaaagccaggaggcaccaccaacctgcaacagaagaagagccaggcccggctggctcccgagatcgtgtctgcctcccagtaccgcaagtttgatgagttccagacgggcatcctcatctatgagctgctccaccagcccaacccattcgaggtgcgagcccagctccgggagcgcgactaccggcgggaggacttacccccgctgcccacactgtccctctactctcccggcctgcagcaactcgcccatctactgcttgaggctgatcccatcaagcgcatccgcataggtgaagctaagcgggtgctgcagtgcttgctgtgggggccacggcgggagctggtggagcagccgtgcacgtcagaggaggtactgtgtaacactctgcacaactggatcgacatgaagcgagcactgatgatgatgaagtttgctgagaaggcggtggaccgaaggcggggtgtggaactggaggactggctttgctgccagtacttggcctcggcagagccaggggccctcttgcagtccctgaagctcctacaacttctctgagccattccatcgccaccgccttccacgcctgccccatgcccttgccttgcctgcatccggattaccctgggaaatggtacaaatgactgttgtccttggatgtaatattttatatatatacatatat

SEQ ID NO: 67 - DNA, 6996 bp, Mus musculus
gtggactccgcggccgcgagtagttagttagttgtgtcagttgctcggtggaggcggccgcgatcaccagaaaggggacgggacaggaggcaatgctgaatatcgcaacggcttgtgctcccctcaggtgtctgtccaacccaggacttatgcgctagatgtttcttggtagcttgcctagaaaacccaagtaaacatcggtactttcagaatataggaatgagaggcaaggaagaaaggacattcatcatacgaagatttgaatcactttgaaactgtaaagggatgtagcacttgctgccaaactaccttgctcaccagaatgaaggaagtgcttcagcattaaatgattgatcgtacttagaggagctgctatgacaacataaggaggtgaaaactcacagatgcaaatgcaagtcttgctatgcactgaaggaaaagcattgtctgcgaagttctatttttaaaaatgtctgcttgtaacacctttactgaacacgtttggaaacctggcgaatgcaagaattgctttaaacctaaaagcttgcaccagcttcctccagactctgagaagacgcccatcacccacggcagtgggaaaactaatgccaatcacagtaacaaccaccgagtcaggagcacgggcaacttccggccccctgtggctaaaaagcccaccatcgctgtgaagcccactatgatggtggcagatgggcaaagcgtgtgtggcgagctaagcatccaggaacactgtgagaacaagcctgtcatcctggggtggaaccaaaacaagacgtccctgagccagaaaccacttaacaacaattctgaaggtgatgctgaaggctttggcagtgatcctcagcagtgtgccaataatgacagtgcacagaagatatccaataacaacaacgggctaactgaagtgctaaaggagatagcgggcctggaagccacccctccggtcagaggaaatgaaacaaacgccagagaaacattcttgggaagaataaatgattgctacaaacgatcgttggaaagaaagatcccacccagttgcatgaccgggagcatgaaggactctcagggcaaacacgtcatcctgagcgggagcgccgaggtcatcagtaacgaagggggcaggttctgctaccctgagttctccagtggtgaggagagtgaggaagatgtgcttttcagtaacatggaggaggagcatgagagctgggatgagagcgatgaagagctgttggccatggagattcgcatgagagggcagcctcgctttgctaacttcagggcaaacaccctgtctcctgttcgattctttgtgagcaaaaagtggaatactatccccttacggaataagtctctgcagagaatctgtgctgtggactatgacgacagctatgatgaaatcctgaatggttatgaggaaaattctggggtctcctatggtcaaggaagcgttcagagcacaatatcatctgactgcacatcaccaggctcctccttcacagaagagtcacgctctgaaacagccagcagtttatcccagaaggtctgtaatggggggatatctcctggtaacccaggaaattctaaggacatagcagaaactgagtctaattttgaaagtcctcctggtaacaatgaggagaaggacgaatcactgacttccaaaagctcggtgaaagttccagagacgcacaaagctgtccttgctctccgtttacaggagaaggatggcaagattgcagtacatactgagaagccagagagcaaagcttctacagatatcgctggccaggcagtcaccataagcctcgtcccagtagaagaacagacaaagccctaccgtgtggtaaatctggaacagccgctgtgtaagccatataccgttgtggatgtgtcggcagccatggccagcgagcacctggggcgacccaagataaaaggttcatcttctactccaaactctccagttacatcacctgcattgacaccaggacaaataaatgcccatctcaaaaaatccagtgcaatccgataccaggaagtgtggacgtccagcaccagtccacgacaaaagatccctaaaatagaattaagtactgggggacctgggccaaatgtccctccaaggaaaaactgccataagtcggcgcccacttcacccacggctacaaacatctcctctaaaaccatccctgttaagtcacctaatttgtctgaaataaaatttaatagttacaacaatgccgggatgccaccttttcccattatcatccatgatgagccatcctatgcccggagttccaaaaatgccattaaagtccccattgttattaatccaaatgcgtatgacaatctcgccatctacaaaagtttcctgggaacaagtggagaactctctgtgaaggaaaaaaccacaagcgtaataagccatacttacgaagaaatagaaactgaaagcaaagtgtctgatagcacccccagcaagctcacagactgtccccaagctaaagggttttccaacagcacagagcggaaaagaggctcagtagcgcagaaggtgcaggagtttaacaattgtctcaacagaggtcagtcttctccacaaagaagctacagttccacccacagctccccagcaaaaatccagagacccactcaagagcctgcgggcaaaacggaaggggcacaagggtctcaggtgccaggcagcagcagcaacagcactagggagaaagcaagcgccgtcctatgtcagattgtggcatctatccaacccccccagactcctccagaagcacctcaatctagccctaaggcttgcagtgtggaagagctttatgccgttcccccagatgcagatactacaaaaagtattcctaaaaacccaccagtcagacccaaatctctttttacatctcagtctagtggggaaggtgaggcccatcagaccacagaaagccctactgccaaaattcagaaagatccatccacgaagccagtgacttctcctccctccaaattagtgacgagcgcccagagtgagccaccgcctccctttcccccaccacggtctacttcctccccttaccatgcaagtaacctgttgcaaaggcattttaccaattggacgaagccaaccagtcctacccgatcaacagaagctgaatcaattttgcactctgaaggcagcaggcgagccgctgatgcaaaacctaaacgctggatatcatttaaaagcttcttccgccgccgcaaaacagatgaggaagaagagaaggagaaagagcgagagaaagggaagctggtgggcctggacgggacagtcatccacatgctgccgccccctccagtccagcgccatcactggttcacagaggccaaaggagaggccagcgagaagcctgctatagtcttcatgtacaggtgtgaccctgaccaaggccacctcagtgtggaccaaagcaaggctggggcagagaaaggaagagcagaggaggtgttactgcggaactcggaagagaagaaaagtagctatcttccatcacagattcctgacaaagcttgcagtcgtgtgacccatgaagtggcaggagaactttctcctcgggatccaagaactcctgctgggaaacaagatggcacttcagtcacaccaacactgcctccacctgacctggaaagggaagaagaaaaagatgacactttggatcctactgacgtgagtccctgcagtgcaacctacagcaacctaggacaatctcgagcagctatgatacctcccaagcatccacggcatcccaagggagcggtggatgatgccattgcctttggagagaagacagaccaagaaggactgaatgcttcccaacccacaccacccccactgccaaagaaaatgatacgagccaataccgagcccatctccaaagaccttcagaaagccatggaaagcagtctttgcgtcatggctaatcccacctacgatattgatcccaactgggatgccagcagtgctgggtcttctattagctatgaactcaagggactagacgttgagtcttatgaatccttggagagacctttgcataaggagagacccgttccttcagcagcaaacagtatctccagcctagccactctcagtgttaaggacagattttctaacagtatggagtcactctccagtcgacgtggtctctcctatagacagactcgaagcatccagaagccacagagacaagcactttatcgaggacttgacaatcgggaggaagtggtgggtaaactccgaagccttcatacagatgccttgaagagactggcagttaaatgtgaagacctcttcatggctgggcagaaagaccaactccgctttggagtagacagctggtcagacttcaggctaaccagcgacaaaccgtgctgcgaagctggagatgcggtttactacactgcctcgtatgcaaaagatccactcagtaactatgcagtcaagatctgcaagagcaaagctaaggagtctcagcagtattaccatagcctggctgtccggcagagtctgcctgtgcattttaacatccagcaggattgtggccatttccttgctgaagtccctagtcgtctgcttccctgggaggatcctgatgctcctgaaaaggcagaggatggcactgaagacagcgaagaagaggggaaggcagaaactttggggggaaatcctgagccctgctctgaaacagagccatcccagaaagagaaccaacgagtcacaaacaggaaacaaagaagccacgttgtggtcatcaccagggaggttccccatctcactgtggccgacttcgtgcgagattctttggcccatcatgggaacagccctgacttgtatgagaggcaagtgtgtctgctgctcttacagctgtgctctgggcttgagcacctcaagccctaccacgtcacgcactgcgatcttcgcctggagaacttgctgcttgtccagcaccaacctgggggagctgcccagggcccttctcctgcagacccttgccccaccttagcttgtcctacaaggctcattgtgagtaacttctctcaggccaagcagaagagccacctggtggacccccagatcctccgagaccagtcccgccttgccccagagatcatcacggccacccagtataagaagtgtgatgaattccagacgggcattctcatctatgagatgctgcacctgcccaacccttttgacgagaacccggagctgaaggagaaggagtacacgcgcacagatctgcctcggatccctctccgctccccgtactcctggggtctacagcagcttgctagctgcctcctgaatcccaacccttctgagcgcatcctcatttctgacgccaaaggcatcctccaatgtctgctctggggcccccgagaagatctctttcaaatcttcaccacctctgcaaccctcgcacagaagaacgctctgctccaaaactggttagacatcaagcgaaccctgctgatgatcaagttcgcggagaagtccctggacagagaggggggcatcagcctggaggactggctttgtgctcagtatctggcctttgccactacagactccctgagctatattgtaaaaatcctgcaataccgttaatatggcccgggcattgcttttattgttaaatatctccaccttcctcatgttaccctcatgtccctgtcctggtatccactcagaatttaaggaaaggaaagaagccaactgccacccttgtccagggacatgggctccgttcagcaaggtcacctacagctttctacagtgaatggctgagtgtttctttactgtacagcagttcagctgcacaaacatgcagtcaccttcccttggagcatttgtcatcccaatagtctcacaaatgtggggtaagaagtgaaaaatgcacagccatgaaggagcagctcccatggaatgatctcaccaagctgcatacacctcttccataactctgaagctcgcctgcattaactagctagcagtacacacatcaccaacctcagctgtcacccactaatgctctcacagcagattcctctcccttgaagtgaccacctctttccctagaggacatcccattatccttcttggctccgttgtagtcactggggactagcctttgctctggcatacagtgaaaggaggggaccctacatagagagccacccggcagccgcaaccctgctgccactgcttcactgtccttcaccttcaccctgtcccgcctgctgaagtttgggtttatcattcacttcttgtggtggcccattacaaagctgaccaaaggtggtatcaccgatgcctcagcaggatgaaatatagtccagagattatgaatagttggcaggatatgaagaaataatgtccttatgtgtgcaattctccaggggccctcagggaacagactttcaagtactgttctttgattcctgtcagacctacccgcatggcagccaggcctggtggtgtctgtctgagtcagagtttcttcccccacaagcagtaattggccagcttccttccgtcagtaagccggtattaactagtctgccaaatgctgtcggcaacagccctgagtgagatggttatccgtttagcgtcaccatcaccttagaaagctacccgaagctggctattggaatggccggaagacaaggggaatgggaaaggtcacgaagatggctgacctgttcctcggagtgcgagcctcttccagaaagactgcctcccagagtgagtggcacgttgctcctaagactctgcagtgggtctggagctcggctcacaggaaggctgatggctgcagtgggtgactgagagttgttccccgtggagcccgggctctcccgtgaattatgtgcaatttttgtatgtatttttaagctgtatattacagtgtttatgttgcaactttc

SEQ ID NO: 68 - DNA, 1870 bp, Mus musculus
atgggccaccaggaatctccgctgaccagagcggcggcgggaggtgcagcttacataaagaggttacgtaaagtgctcagctggcgtgaactcggggacggccacgggaacctggaagccgaggcctcccccgggagcgttgctgtcatcacaagagcagcgccgcgacgcgctacacgctcagccaggctccccgcctcgcgccctacccggctctgcagacaagcccggctcggaacggaccatcctccggcgcgggctccaagggggaaccggttcgcccggaagaggaacagcgccggccagatcaccatccaaggtcccgctcctccacatctcggggctagacggagggatgaggcaaggggggcccgggcggcgccgttgctgctccccccgccccccgcagccatggaaacggggaaagagaacggagcccgcagagggacaaaaagcccggagcggaaaaggcgaagcccagtccagcgggtactgtgcgagaagctgaggccggcggcccaggccatggatccggctggggccgaggtcccgggcgaggccttcctggcccggcggcggccggatggcggcggcggggatgttcctgcacggccgcgctacagcctcttggcggagatcgggcgcggcagctacggcgtggtttatgaggctgtggctgggcgcagtggggccagggtggcagtcaagaagatccgctgcgacgctcccgagaacgtggagttggcactagcagaattctgggccctcaccagtctcaagcggcggcaccagaatatcgtgcagtttgaggagtgcgtcctacagcgcaacgggttagcccagcgcatgagtcacggcaacaagaactcacagctttacctgcgcctggtggagacctcgctcaaaggagaaaggatcctgggctatgctgaggagccctgctatctctggtttgtcatggagtactgtgaaggtggagacctcaatcagtatgtcctgtcccggagacctgacccagccaccaacaaaagtttcatgctacagcttacaagcgccattgccttcctgcataaaaaccacatcgtgcacagggacctaaagccagacaacatcctgatcacagagcggtctggcacccccatcctcaaggtggcagactttggactgagcaaggtctgtgcagggctggcaccccgaggcaaagagggcaatcaagataacaaaaatgtgaatgtgaataaatactggctgtcctcagcttgtggctcagacttctacatggctcccgaagtctgggagggacactatacagccaaggcggacatctttgctctgggcattatcatctgggcaatgatagaaagaattacctttattgactctgaaaccaagaaggagctcctggggacctacattaagcaagggactgagatcgtccctgttggtgaggcgctgctagaaaacccaaagatggagttgcatatcccccagaaacgtaggacttccatgtctgagggggtcaagcagctcttgaaagacatgttagctgctaacccacaggaccgacctgatgcttttgaacttgaaacccgaatggaccaggtcacatgtgctgcttaaactccagggctgaacgtcttgggtgtttttaaactaggtcgattcttcgggacccacagtctcatcgtgtctcggacaggatggcagagggtacaggtggtggtgatctcctgacagctggacctcccacaatgtgaactcacgcttgggctgcccactctacccttctctttctccttcagtagaataataattgtttttctaaacattaaaccatcaagacttctgaagagcagaaggctacactctg

SEQ ID NO: 69 - DNA, 4776 bp, Mus musculus
acagcttccggtgggtgaccccgggactccggagctccctcagagtgtggcggtttctgagcattcatgtcggcaggcctgcctagagtaagaagtagctggaaaacatgtctcggggggctccttttccagtcccttgcccggtgctgctggggaccttcacagatgactccctggaggctcagcttcacgaatacgccaagcaagggaactgcgtgaagctcaagaagattcttaagaagggagtctgtgtcgatgcagttaacactcagggccagtcagcgctctttgttgcagcattactgggccatgtgaaattagtggatgttctggtggattatggatcagatccaaatcaccgctgctttgacgggagcactcctgtccatgcagcagccttttcaggcaaccagtggatcctcagtaaactgctgactgcagggggtgacctgcgactccatgatgagaagggtcggaatccacaggcctgggccttgacagcagggaaggatcgtagcactcagatggtggagttcatgcaacgttgtacttcacatatgaaggctatcatccagggcttctcctatgaccttctgaagaagatagactctcctcagcgactcatcggcagcccaccctggtttggtagcctcattcagggaagcccaaatagttctcccaaccgacagcttaaacctggaatcatttctgcccaaaatatctacagctttggctttgggaagttttatctcacctcagggatgcagcttacttacccaggatctcttccagtcattggagagaaggaagtggtccaggctgatgatgagcccaccttctctttcttcagtggcccctacatggtcatgactaacctcgtgtggaataggagcagagtcacagtaaaggagctgaaccttcccacccgtccccactgtagcaggctgaggttggccgacttgctgattgctgagcaggagcacagcagcaacctgcggcatcctaacctgctgcaactgatggctgtatgtttgtcccgggacctggagaaaattcgcctggtttacgagcgtatcgcagtcggcacactgttcagtgtcctccatgaacgaaggtcccagttcccagtgctgcacatggaggtgattgtgcacctgttgctccaggttgctgatgccttgatatacctgcattcccgggggttcatccaccgctccctcagctcctacgctgtccacatcgtctctgcaggagaagcaaggctgactaacctggaatacctgacggaaagccaggacagtggtgcacacaggaacgtgactcgaatgcccctccccacccagctgtacaactgggctgcaccagaagtggtcttgcagaaggcagccacggtgaagtcagacatatacagcttttccgtgatcatacaagagatcttaacagacagtataccctggaatggcttggatggctcacttgttaaagaaaccatagccttgggaaattatttagaagctgatgtcaggcttccggaaccttactatgatattgttaagtcaggaatccatgccaagcagaagaaccgaacaatgaaccttcaagatattcgttatattctgaagaatgacttaaaggaatttattggagctcagaaaactcagccaaccgagagccccagagggcagagctatgaaccccatcctgatgttaatatctgcctaggtctaacttcagaatatcaaaaggaccctccagacttggacatcaaggaactaaaggaaatgggtagtcagccccattcacctacagatcactcctttctcactgtaaaaccaacactagctcctcagaccctagattcaagtctgtcagcccagaaacctgacaatgcaaatgttccttctcctcctgctgcatgtctggcagaagaggtcaggagccccactgcaagtcaggacagcctctgcagctttgaaatcaatgagatctactcaggctgcttgacactgggaactgacaaggaggaagagtgtctggggactgctgcttcacctgagggggatagaccaaaccagggagatgagctgccatccctggaagaagagctcgataagatggagagagaattgcactgtttttgtgaagaggacaaaagcatttcagaagttgacacagaccttctttttgaggatgatgactggcaaagtgattctcttggttcactcaacctgcccgaaccaaccagagaagccaagggcaaaacgagcagctggtccaagactgatgagtatgtcagtaagtgtgtgctgaatctgaagatttcacaggtgatgatgcagcagagcgctgagtggctgaggaagcttgagcaggaggtagaggagctcgagtgggcacagaaggagctggacagtcagtgcagcagtttgcgggatgcttcattaaagtttgcaaatgccaagttccagccggctgtaggccctccatctttggcctatcttcctcctgttatgcaattaccagggctcaagcagcctgaaaatggtggcacctggttaaccctagcaaggtctccaggaaatgagagagagttccaagagggacattttagcaaaaaacctgagaaactaagtgcctgtggctggaagccttttacacaagtgtctgaagaaagcagaggggactgctcagagctaaacaatcagctgccgactcttcgtggtcctgggaagcagagcacaggtgagcagttaccatccactcaagaagcaagggagagtttggaaaaaaatacaaaccaaaatagtaggagtatggcgtctgtgtcttctgaaatctatgctactaagtcaagaaataatgaggataatggagaggcacacttgaaatggagattggcagtaaaagaaatggcagagaaagcagtttccggacagctcttattacctccttggaatcctcagagtagtgcgccttttgagagtaaggttgaaaatgagagcactcctttgccacggcccccaattagaggtcctgagagcacagaatggcagcacattttagaataccagagggaaaatgatgagcccaaaggaaatacgaagtttggcaaaatggacaacagtgactgtgacaagaacaagcacagcagatggacaggcctccagcgcttcactggtattagatacccattcttcagaaaccacgagcagccagagcagaatgaagcctctcaagcaagctgtgacacgtctgtgggcactgagaagttctacagcacctcaagtcccataggagacgactttgaaagattccaagattcttttgcccaacgtcaaggctatgttgaagaaaatttccaaataagagaaatatttgaaaagaatgctgagattttgaccaagcctcagtttcaagctattcaatgtgctgaagacaaacaagacgaaacattaggggagacgccaaaggaactgaaagagaaaaacacatcactgacagacattcaagacttgtccagcatcacctatgatcaagacggctattttaaggaaacctcatacaaaacacccaaattaaaacacgcaccaactagtgccagtaccccgctaagcccagagtcgatttcttcagctgctagtcactatgaagactgccttgaaaataccacatttcatgttaaaagaggatctacattttgttggaatggccaagaagctatgagaactttgtctgccaaatttacaactgtccgagagagagctaagagcctggaatcacttctcgcttcttctaaaagcctacctgccaagctgactgactccaagagattgtgtatgttgagtgagactggctcttctaacgtttctgcggcatttgtaacatcaactcatgctaccaagaggaagagcctacccagagaactggcagaagccacctctcaacagcatcttgatgagcttccaccaccagctcaggagctacttgatgaaattgagcaactgaagcagcagcaggtctcatccctggcgtcacatgagaacacggcacgtgatctgagtgtcactaacaaggataagaagcatttggaagaacaagaaaccaacagtagtaaagacagcagttttctttccagcagagaaattcaggatctggaagatacagagagagctcattcttctcttgatgaggacctggaaagattcctgcagtcacctgaggagaacacggcactgctggaccctaccaagggctctacaagggagaaaaaaaacaaagatcaagacgttgttgagcagaagagaaaaaagaaagaaagcatcaagccagagagaagggagtcagacagctccctagggaccttggaagaagatgaactaaaaccctgtttttggaagcgactgggttggtccgaaccttccaggataattgtgctggatcagagcgacttgtcagactgattggaactggaccgtgcaagcattgtggctgtggcctcctttcttctcttatctgcttcagttgcctcaaggacagtagtttcagtctgtaactcacactttgttctgctgctactatgggcacaataatgtgtccctatcatgtgtagcatgcttaatcatttgttttaaatcaggtttctgaaaagtgcaaagtaaccatagtggcaaacattttgtgttcagaatggcttttgttttttctgatgtaaatttttgaaaccataactttgttatataataaagtgtttactttcaatgctaaaaaaaaaaaaaa

SEQ ID NO: 70 - DNA, 1470 bp, Mus musculus
cctgtggagctgggctccgtgagggatccaaacgcccaggtggggcgtctgcatcgcctagctatggccagaggcccatgctggggcctagccaggcttctgcgcagagttgttcaggtagatggggagaactctgctgggcagacagcgctcttcctgtctgcgctactgggccacacttctgctgtgcgcctcctactggcctttggcgccaaccccaaccacccccatccagcttcccacccccttttcatccatcccgcccttgcctcccattctgccctagccgctgcctggatggcagcacacccatgcatgcaggtgcctcctctgggccgaggcttggtgttgtggcacctgctgcaggcaggaggtgacctgcgtctgcgtgaccagcagggtcgcacgccaggagattgggctgagcagggtgacgccaagcagagctgggaggtgctggaactgttacaatggtgccggacccacatgtcagcactggtccagagtggggagttggcccccagtgtgtccttgagtcagttgcaagctagctctggacacagcctgtgtggctcccttccttcactaaggctggtccaggcagacagggcactgaggcaagggcagatcagaaggtcccccaaaaccccagcgttggggtttggccagttgagcagcctccagccaccggcactggtaatgggcatcccagtagtagaccccaaggagctggtaccaacccagggtgagcctgaccgcacctacaacagcacccttccctcctgctgccctcacaaggaaatcctgcccctggcactcacctgctgcccattctccagcctcctgtggaagggccacccggttactgtacggcagctgaagagttctgaatccagccctgatgtgctattggctgaccttcagcactgcagcatcctgcaccaccctggcctgctgttgctgatggcactgagcccctcagaggacctgtccagactgagtctgctcttcgagccagtgtggctgggctccctttacctcctgctgcactctgtgagagaggatgaggaaggcttggctaaggtgagccacctagaacacgggcgtccactgcaccagcccaggctgcagcccagactgaaacaagactgctcccagagagacccaaatccagggctgcccccaccccctgaactgtacccatggctaccacttgagctgatccatggcgacgtgccagccactacctcagacctctacagcttctgcatcctggcccaggaggtcttcacgggagagctgccctgggctggaggagaggggcctgaggtgaaagctaagctggaggcaggccagagtccaggcctggaccccttgctgccagccccctaccaggccttggtccaagctgggctgggtctagagcctgctgaccgctggggcagcttgcagagcactcggtacctgctg

SEQ ID NO: 71 - DNA, 3147 bp, Mus musculus
attcccggagccgaggagggctcgcggcggccgctccgctgggctccaggttgggctgctgggcgctgggccagggcgggcgggagcggggcgagggcttgcgcggagggcggcggcctgggctcgccgagccatggcggccccggagccggcgccgaggagaggccgggagcgcgagcgggaggacgagagcgaggacgagagcgacatcctggaggagagcccgtgtggccgctggcagaagcggcgggagcaggtgaaccaagggaacatgcccgggatccagagcacctttctggccatggacacggaggagggtgtagaagtggtgtggaacgaacttcacttcggggataggaaggcctttgcggcccatgaggagaagatccagaccatgtttgagcagctggcgctggtggaccatcccaacatcgtcaagctgcacaagtattggctggacgcctctgaggcccgcgcgagggtcatcttcatcacagaatacgtgtcgtctggcagcctcaagcagttcctcaaaaagaccaagaagaaccacaaggccatgaacgcccgggcctggaagcgctggtgtacgcagatcctgtctgcactcagttttttgcacgcctgcagtccccccatcatccacgggaacctgacgagcgacaccatcttcattcagcacaatggcctcatcaagatcggctccgtgtggtaccgcatcttctccaatgcacttcctgatgatctccggagccctattcgagctgaacgggaagaactccgaaacctgcactttttcccaccagagtatggcgaagtcaatgatgggactgctgtggacatcttctccttcgggatgtgtgcactggagatggctgtactcgagatccaagccaacggggataccagagtcacagaagaggccatcgctcgagccaggcactcactgagtgaccccaacatgcgggaattcatcctctcctgcctggcccgggaccctgcccgccgaccctcagcccacaacctcctcttccaccgagtgctctttgaggtgcactcgctgaagctgctggcagctcactgcttcatccagcaccagtacctcatgcctgagaatgtggtagaggaaaagaccaaggccatggacctccatgcagttttggctgagatgccgcagccccatggacccccaatgcagtggcggtactcagaggtctccttcttggagctggacaaattcctagaggatgtcaggaacgggatctatccactgatgaactttgcggctgctcggcccttggggcttccccgtgtgttggccccacccccagaggaagcccaaaaggccaaaactccaacgccagaaccctttgactcggagaccaggaaggtggtccagatgcagtgcaacctggaaagaagcgaggacaaggctcggtggcaccttactctgctcttggtgcttgaggaccggctacatcggcagctgacctatgatctgctcccaacggacagtgcccaggacctcgctgctgaactagtgcattatggcttcctgcacgaggatgacaggacaaagctagcagcctttctggagaccacttttctcaagtaccgagggacgcaagcgtgaccttcccagtcctgacggcccagcagagatacaggggctcagggttgtccacttggcaaagagcccccacactgctcaaagctgccttctgcctgtgttccctggaactgaacacaggccctgctagtgaagacacccccaccccccagctttctgcagcagtgtgggaccctggggtggtgatggagccctgagcctggacgagagtggatacaggtcagttaggggaaccgctccatctggtactagacaacagccatgccttcaggtggcatagaaacctagggaaggagcctgaattcaggtgtcacagtgctgggcatcaggcagaccagacctgacctgattggagaactgtagactagatagcttggagttgaacccatggccagggaattccttggtcctgctcagaccagtcctgatcccttgcagacctgccttgagcccactttctgatcttccacactcttgagaccaggacctgtgtcctccccaaagcccttgggaaggatctttctattcatcatccctctggcctaggggctcaggggtcaggcatcctccacattccctccctggggaagttgtgtgtttgagttgaggatgtgggttcctggctccctctttctccccagcccaacttgtctctttcttactggtttcaaagtcctgatgaacgcttcccctcagagccaccctggtttccttggttcttgaactgcctctctcccaacttcaaaccaggtcttaaacgttttttaaatgcatatataaatgtaatgcagtcacggtcctttttaaacactttgtgtatgaaaccaggaaagctcactattgtattatgaatagttccacattgctgctgttaacagatatcataaacccagtggtttgagacgacacacacacacacacacacacacacacacacacacacacacacagagttctgtacatcaagtgtgatccaggctctcactagattaatacccaggctaagttcctttctggaagctgggacttacctcctgctccttcaagctattggcagaactcacttccctgcaatggtaaggcagaaatccctattttctcaacagctgccaactaagaacccctctcagcttctagaggccatcaacttttcttagttcttctttctcccccctcaagaccagcagcgtcaagttgaatctttgtcctgggctagctgactggcttgccactgctgggaagagttggggccttttgtgagtaggttggacccacctggataaccgaggatgatccccttctcagggtctgtagatgaaccacacctgcgcagttccttctgctgtcatcctgggctttggtgcttggagaacagcggtgggcggtgggtgttgttactgtggtacctaccatgccattttaaccgaaaccaagacctaaaataaaacagatttgtcatggggcatttaataaattaaatgaactttggaaaaaaaaaaaaaaaaaaaaaaaaaaaa

SEQ ID NO: 72 - DNA, 1473 bp, Mus musculus
  misc_feature (280)..(339): n is a, c, g, or t
atgcggcgccggcgggcggccgtggccgctggtttctgcgcctccttcctgctgggctccgtcctcaacgtgctcttcgcaccgggctcggagcctccgcggccaggccagtccccggggtcctcggcagccccgggcccgggccgtcgcgggggccgtggggagctggcccggcagatccgggagcgctacgaggaggtgcagcgctattcccgcggggggccggggccgggagccggccggccagagcggcggcgcctgatggacctggctccgggcnnnnnnnnnnnnnnnnnnnnnnnnnnnnnnnnnnnnnnnnnnnnnnnnnnnnnnnnnnnntggccccctgctcccggcccgggctcccccggcccgggcccgcgcataggctgcgccgcgctccgcaacgtgtctggcgcgcagtacgtgggctcaggctacactaaggctgtgtaccgggtccgcctgcccggcggcgccgcggtggcgcttaaagcagtggacttcagcggccacgatctgggcagctgcgtgcgcgagttcggggcgcgaaggggctgctatcgcctggcggcccacaagctgctcaaagagatggtgctgctggagcggctgcggcaccccaacgtgctgcagctctatggctattgctaccaggacagtgagggcatcccagacacgctgaccaccatcacagagctgggtgcccctgtggagatgatccagctgttgcagacttcctgggaggatcgattccgaatctgcctcagccttggccgcctcctccaccacctggcccactccccgctgggctcggtcaccctgcttgacttccgccctcggcagtttgtgctagtgaacggggagctgaaagtgacagacctggatgatgcccgcgtggaagagacaccgtgcaccagcagtgccgactgcacgctagagtttccagccaggaacttcagcctgccctgctcggcccagggctggtgcgagggcatgaatgagaaacggaacctctacaatgcctacaggttcttcttcacatacctcctgccacacagtgccccgccttccctccgacctctcctggatagcatcgtcaatgccacgggagagctcgcctggggggtggatgagaccctggcccagctggagacagcgctacacttgttccgaagtgggcagtacctgcagaactctacaagcagcagggctgagtaccagcgcatcccggacagtgccatcacacaggaggactatcgctgctggccatcctatcaccacggcggctgcctcctgtccgtgttcaacctggctgaggctatagatgtctgtgagagccatgctcagtgtcgtgcctttgtggtcaccaaccagaccacctggacaggtcggaagctggtcttttttaagactggatggaaccaagtggtccctgatgccggcaagaccacatatgtgaaggcccctggt

SEQ ID NO: 73 - DNA, 5262 bp, Mus musculus
gagggggccgggccagcggctcagccagccgcgaagacagctggctgagcgatggaggccgacgggcagtcatgggccggcgagtccgtgtcgggcccgggtcccggaggcggcggaatgatccgcgagctgtgccggggcttcagccgctaccgccgctacctgggacggctgcggcagaacctgcgagagacccagaagttcttccgcgacatcaagtgctcccacagccacagttgtccctcctcccccgcgggcggcggagcggccgagcttggccctgccggcgacgtcgccgaagccccgctgccggcgggccagctgagctgcatttccttcccacccatggaagagacgtatctgcagcagcttgtggaccgccttccctgtatactgatcctcggccaggactgcaacgccaagtgccagctgctgaacctgctgttgggggtgcaggtgcttcccaccctcaagctggacagtgatgagagctgtaagcttcgtcgcctccgcttcacctatgggactcggactcgggtcagcttggcgctccccggtcagtatgaactagtgcacacgctagcttcacatcaggacaactgggagactatccctgaggaggacctggaggttcaagaagacagtgaggacgctgctcatgtgctagctgacctcgaggtgacaatgcatcatgctctcctgcaggaagtggacattgtggtggcaccgtgcccgagccaccggccctcagtagatgttctgagtgacttggcaaatgacttcttgcctgtgataacctatgcacttcacaaggatgaactctctgagcggggtgagcaagagcttcgggaagttagacagtatttctccttccccatgttctttttcaaagtacccaagctggagataatcagctcttccagtgggagagcagagagtgaaaggtcaccactgtatggacagctggtggacctgggctacctgagcagcagtcacaggaactgtgtgccctctgaccaggactgtaaagctcagagcatgttggtggagcaaagtgagaagctgaaacaactgagtacattttctcaccagctgctacagaaccgcctagtggatgcagccaaggccctgaatgtggtgcacagccactgccttgacatctttattaaccaggcttttgacatgcagcgggacctgcagattactcccaaacgcctagaatatactagaaaaaaggagaatgaattgtatgaatcgttgatgaatattgccaaccgaaagcaagaggaaatgaaggatatgattgttgagacacttaacaccatgaaagaggaacttctggatgatgctgccaacatggagtttaaagatgtcattgtccctgagaatggagaaacaatcgggaccagggagatcaaatcctgcatccgccagatccaggagctcatcatctccaggctcaatcaggccgtggccaacaagctgatcagctcagtggactacctgcgggaaagctttgttgggaccctggagcggtgtctgcagagccttgaaaaatcacaggatgtctcagttcatattaccagcaactatctcaaacagatcttaaatgccgcttaccatgttgaggtcacttttcactcgggatcctcagttactcggatgctttgggaacaaatcaagcagatcatccagcgtatcacatgggtgaacccacccaccatcactctagagtggaagaggaaggtggcccaggaagccatcgacagcctcagcgcctccaagttggccaagagcatttgcagccagttccgcacgcggctcaatagttctcatgaggcgtttgcagcctccttgaggcagctggaagctggccattctggccgtctggagaaaactgaagatctgtggctaaaggttcgaaaagatcacgcccctcgtctggcccgcctttcgctagagagccggtctttacaggatgtcttgcttcaccgtaaacctaaattaggacaggaactaggccggggccaatatggtgtggtatacctgtgtgacaactgggggggacacttcccttgtgccctcaaatcagttgttcctccagatgagaagcactggaacgatctggcattggagtttcattacatgaggtctctgccaaagcatgagcggctggtcgatcttcatggctcagtcattgactacaactatggtggcggctccagcgttgctgtactgcttatcatggagcggctacaccgggacctctacacagggctgaaggctgggctgaccctggagacacgtttgcaaatagctctggatgtggtggagggaatccgctttctgcacagccaggggcttgttcatcgggatatcaaactgaaaaatgtgctgctggacaaacaaaaccgtgccaagatcaccgacttaggattctgtaaaccagaagctatgatgtcaggcagcattgtggggacaccaatccatatggcccctgaacttttcacaggaaagtatgataactctgtggacgtctatgcttttgggatccttttttggtatatctgctccggctctatcaagctccctgaggcatttgagaggtgtgctagcaaagaccatctctggaataatgtgcgcagagggacccgtccagagcgtcttcctgtgtttgatgaggagtgctggcagttgatggaggcgtgttgggatggtgaccccttgaagaggcccctcttgggcatcgtgcagcctatgctccgaagcattatggaccggctctgcaagtgcagctctgaacaaccaaacagaggactagacgattctacttgaagacaaaaccctttctcttccactctgttccttccttccctctcaccttttggccatggggagaatttgtcatttgttcattaaggaggctcccaagggaactggtgcttggtggcaactcgaagccttcctgggtagggatggctcctgggcagtgaagaagtcagtggctgtttagtgttcacactaccttacactgcctctttggcaaaagactgtctcagatgtttaaaagctgaagaatgtgatgttctggcctcagaactgaaaaggagacaactgttaccactgtctgctcgctgtgtgtcactaaaacaagacaggcttgcagtgcagggcatcagtccagcggtagagaccacttagaaacatgaccttagttccagattgtatggtcataaaggcaaaaaccaaaccaacctagccagatagacctgaggttgtctggttcttggtctttatagccaggatctcaggttgttacagtcaaagacccaggaggcagttagacatgaagctgtctgtcctcacaacccagtgtgtttacatttccagggccagggagccctggtttctgtggggcagagctaacccagaacagaatctgtttgattcttgtgtctttccccaccctctacccttctttttcctcaaaaaagaaaggagggaataaaccagataacatggtacttgggcttgagcatctagtcagaaataggctataattttgttgtttttaatgggatgtagcccaggctagccttaagtcatccatatgctaccatgcatagcttctaactatataactcgctcctttcttcttccgtgctagggatcaatcccactgctcagatattgctggtaagcactctcccatgggctatgctccagctccatatagctttccaagttcactttgaacactctgcaccatgaactctgataattgtgcagttgagcatggtggtctacacactcacagctcttcagaaacgccaggtaatgctttctacatgcaaactggaatggacaagtggcgggccattgtctttgggttccttggctctggttcattttggcagaatgcttagtctagcttttagaattttaacacctactcaactatacttagttactctactctgagggttaacatgttgctctctggagacagtaggacgtacaggaagccaaggagtcaggagggaagaaatgagtcgtctcagcttgttaggtctgtggtgcgtgaaacctgagatcttgtgtagttagaagactgctgaccctgctcttgagtctagctgtaataaagaggcggtagctccagtatggaactatattcctaacattctttggaccacttagcccacactcagactcctaagtggaggttagagttttgttccctcattcagagtctctttttcgtctcctgtcagattacaggttccttcttttaattttaaaaagccagttttcatcattttctgctcagtgggaggagcagagagattaatgccttagggaaaggaggaggagttgtatagttcattcattagagtagccgagcaaggcccacgatagtcctgagagtatccgggcaagccaaaggccacattgggggtatttggtgttggtatttcaatgctcagcgggctgagtatgtgaacacatatgtctaatttgtgtgtgttgtacttcataacattgtaagctattttttgattctgtggtttttggcatctactattatttcagcgataaaatgccacgaaatgtactgtattgtatatcacttgggaagacactaggcggtcagagaagtgtggtggcacttgggtagtacagggcttgacagggccaaagttttgaagatttacctctgggctgagtgaggaagaagggtggcatgaagagtgccatccttcaaaacagttgccacagctccagcccagcactgacacccggctgcttctcgggagctcaaagtctggcctcagaatggagtgacaggcctttctgcagagcaatcagaaaaaatgccggcagagtctgagcccaagagctgtatctgaggcccagatgactggcttcttgactgagcaatctttcagtgttctcaggaagaggactatcctagttgttgccagaccaaagagagtcacttctgactctgtcaagtttaagggacagggctaggcagccatgttaacactaatgctcaagaaaaccaaggaaaggctgcaatgctgttacagccagagcaggagaatgggaaactgaacacctggcagctcccaggatgcttttctgtatttttgcttgagctgtcaaacaggttggagcactcagggtagaatgtgcttagcctgcacatggccttgggttcagtgtctagacacaaaaaaaaaaaaaaaaaaaaaaaaa

SEQ ID NO: 74 - DNA, 1878 bp, Mus musculus
  misc_feature (1090)..(1143): n is a, c, g, or t
atggcggcggcggaaggctcagctggcaggtcctgggcgctcgcgcctgctgcggcctccacaggaagtacccggcggccggcctcgctgagccgcggctgctctagcggctgccacctattgcaaatgctgaatcctggagccttaggggtgaacctggtggtggaagaactggaaactgaaaccaagttcttgataaagcaggtggagtgtattgatgagcaccatgccaacaaggccctggaggagctgatgcccctgctgaagctccaacaccccaatctctctctgtaccatgagatgttcatcatgtggaacaatgagatctcctctctgttcctctgcctggtgatggattattactcccaaggaacattccagaatatcatggagaataagaggaagttaaaagcagttgttgacactgagtggatgcataccatgctaagccaggtattggatgccatcgagtacctacataagttgaacatcgttcacaggaacctcaagccttccaacatcgtccttgttaacagtggctactgtaaactgcaggatatgagctcccaggcactgatgacccacgaagctaagtggaatgtccgagcagaagaagagaacacagcactcagtggtccttccaccttgatcctgtccgcagacccctgccagaagtcctggatggctcctgaagctctcaaattctccttctccaccaaatccgacatctggtctctgggctgcatcattctagacatggccacttgctccttcctgaacgacacagaagccatgcaactgcggaaggccatccgccatcatccaggcagcctgaagcccatcctgaaaaccatggaggagaagcaaatccctggtacagatgtctactatttgcttctgcccttcatgttgcatatcaacccctccgatcgactggcaatcaaggatgtgatgcaagtcaccttcatgagcaactccttcaaaagctcctctgttgcgctgaatatgcagcggcagaaggtccccatcttcatcactgacgtgctgcttgaaggcaacatggccaacatcttaggtgatggtggggatnnnnnnnnnnnnnnnnnnnnnnnnnnnnnnnnnnnnnnnnnnnnnnnnnnnnnntgcttggtgtctctctcccacaacttggtcctagacctggtgtttatgcatgattatctcttggacagagcaccctctgaaagctctttcccagcattgctttcgatgggtattaagcttcttgggaaattctgcaaacggctgccatggcccacagagctgctggaagaggtgatcagcatcataaagcagcatgggcggatcctggatattctgctcagcacctgctcccttctgctgcgtgttcttggccaagttgtcactgtggacaaagagcccttggagcagctctctggcatggtcacctgggtgctggctactcatccggaggacgtggaaatagcagaggctggctgtgcggtgctctggctgctgtccttgttgggctgcataaaggagagtcagtttgagcaggtggtagtgctgctcctgagaagcatccagctgtgccctggcagagtactgctggtgaacaatgcattccgtggcttggccagcctcgcaaaggtgtccgaactggtggccttccgaatagtagtactggaagagggcagcagcggcctccacctcatccaagatatctacaagctctacaaggatgaccctgaggtggtggagaacctctgcatgctgttggcccatctgacctcctacaaggagatcctgccagagatggagtctggaggcatcaaagacctagtccaggtgatccgggggcgctttacctccagcctg

SEQ ID NO: 75 - DNA, 2106 bp, Mus musculus
gaagacccgctcccgctgctccccggctcagatcggcagcgctgcaggcagcactggcttgcgcagtccccgcgcgcgctgcgcactcaggcccaacctgcgcagatggagccccggtcccggcggcggcggagccgccagcttgtggccaccttcctgcgcgacccaggctcggggcgcgtgtaccggcgcgggaagctgatcggcaagggagccttcagccgctgctacaagctcacggacatgtccaccagcgctgtgttcgctcttaaggtggtgccaaggggcggagcggggcggctgcgcctgcgcgggaaggtggagcgtgagatcgccctgcacagccgcctgcgccaccgcaacatcgtggccttccacgcacactttgctgaccgcgatcacgtgtacatggtgctggagtattgtagccgccaggtccctctacagtccttggctcatgtgctgaaagtgcggcggactctgacagagcctgaagtgcgctattaccttcggggcctggtcagcggcctgcgctacttgcaccaacaacgcatcgtgcacagggacctgaaacccagtaatttcttccttaacaagaacatggaggttaagataggtgacctggggctggctgcccgtgtggggcctgctggtcgctgccacagggtgctctgcgggactccaaacttccaggcacctgaagtggtgtcccgaaatggacactcgtgcaaatctgacatctgggctctgggatgcatcatgtacacggtgctgacaggcacgccaccctttgccgcggcacccttgtcagagatgtaccaaaacatccgtgacggccactacctcgagcctactcacctgtcgcccagcgcccgcagcctcattgcacggctcctggcaccggaccccgccgagcggcccagcctggaccacttactgcaagatgacttcttcagtcagggcttcaccccggagcggctgcctccacattcctgccacagcccacctgtgtttgcctttcccccacctctgggcaggttgttccggaaggtgggccagctcctgctgacccagtgccggccaccttgtccctttacctcaaaagaggcctcaggccctggagaagagggcacagaaccagaccacatggaagccggcaacgaggaaagggatcctctctgcaccgagggccgaatccacctcctcacccttgggaccccgcggactggcctggcgggcccaaaagggagcttggctctgcagctggaagtggcaaccagaaaactgttcctctgcttggacgcaggacctatggctggacaggaccccccaggggagcagcggcctgttctctgggctcctaagtgggtggattactccctcaagtatggcttcggctaccagctgtcggatgggggcagtggggtgctgtttcgggatggctcccacatggccctgcgcccccaaggcggccatgtctcctaccaacctgaccaagggactctctggaccttcaccctgagggacgtccccagcccacttcgtgccaagctggctgtcctgcggctctttgcctgctatatgcagcggcgtctgcgggaggaggggactgtgcccatgcctgccacacctgcctctcctgacatctctctgctgagcttcattgctgactcccaggctatggtcatgctgtttagcaatgggacagtgcaggtcagcctcaaaacctcccaaacccagctggtgctaagtggggaggacgaggacctcctgctcaccctccaggagccagggggacccgctgtgggcgtctcctacacactcgatgtcctgcggagccatggcttcacccttgcagtccaccatcacctgcgccatggcctgcatctgctacagagtgtctgaagtctgagcagacctcttcgtgctggcgtggagacctgggaacctgggatctgtttctgtctgtgttaatgcgctgcagccagtgttcatggagggttgacacaacggggccactgatgggtaggggtctttgattatttatagtatgactattcaagctagaattttgttggattttcactaaataaaacagaatccttc

SEQ ID NO: 76 - DNA, 4403 bp, Mus musculus
tctagatcctttgtggggcctgctagccaagcgacagaagtgccctacaaagtgccaatgggcggttcgcatctgtcacacacctctgagagctttgtcctttaaacttctaatcagttccagggagtaaaactggcctcccagatgtgtggaactacccctggatctatagctctttgtcaccgtcttctttctaccttctgagagaccccgaaacccttgccatggaaaagtaccacgttttggagatgattggagaaggctcttttgggagagtgtataagggccgaaaaaaatacagtgctcaggtggtggccttgaagttcatccccaaactggggcgctcagagaaagagctgaggaatctgcaacgagagattgaaatcatgcggggtctgtggcatcccaacattgtgcatatgctcgacagctttgagactgacaaagaggtggtggtggtgacagactacgctgaaggagaactctttcagattctggaagatgatggaaaacttcctgaagaccaggttcaggccatcgctgcccagttggtgtcagctctgtactacctgcattcccaccgcatcctacaccgcgacatgaaaccgcagaacattcttctcgccaagggtggtggcattaaactttgtgactttggattcgcccgagctatgagcaccaacaccatggtgctgacgtcgatcaaaggcacaccgctctatatgtctccagagctggtggaggagcgaccatatgaccacaccgcagacctctggtctgtgggctgcatcctgtatgagctggctgtcggcacgcctcccttctacaccaccagcatctttcagctggttagcctcattctcaaggaccctgtgcgctggccctccaccattagttcctgcttcaagaacttcttgcaggggctgctcaccaaggacccccggcagcgtctgtcctggccagacctcttacatcacccctttattgccggccgtgtcaccatcataactgaaccagcaggctccgatttgggcaccccatttactagtcgcctacccccagaacttcaggtcctcaaggatgaacaggcgcatcggctcgcacccaagggtaaccagtctcgcatcctgcgccaggcctgtaaactcatggctgaagaagccaagcagaaggaagaccaaaatgcaggatctgcccttgaacaagaagacgggctctgcaaggtgacacccagcacagcccccgtgcctggactaaaggccactcctcaggagtcaagcctcttggctggtatactggcttcagaaatgaagaacaactgggaagactggggggctggagaagcaccccgtacctctcgggaaaaccacatcaacctggagtgtgaacaaggcttcccagagccgaggccagaggcgatgggccggcagagcactgatgtagtggatcctgaaaatgaggagccagacagtgatgatgagtggcaacgcctactagagaccagcgagcctgggcctgtgcagctgaagtcccccctcaccctgttgtgtaaccctgacttctgccagcgcatccagagtcagctgcgcgggactggcgagcagatcctgaaaggcgttctggatggtgtgtcccacctccttcctgtactccgcatcctgagtagtctcctatccagctgcaatgactctgtgctcttgtattccttctgccaggaggcaggactgcctgagctgcctctcagccttcttaggtacagccaggagagtagcagcatccagcagcaaccttggtatggggcgctcttacgggacctggtggctgtggttcaggcctacttttcgtgcaccttcaatctggagaggagccagacaggtgacagcctacaggtgtttcaggaggccgccagcctctttttggacctgttggggaagctgctggcccaatcagatgattccgagcagacatttcgaagggatagccttatgtgctttgctgtcttgtgtgaagctgtggacggaaacagctgggccgtctccaaagccttctactccagcctgttgaccacacagcgcgctgtgttggatggcctccttcacggcctgacagtcccacagcttcctttccacacaccaccaggagccccacaagtgagccagccgctgcgggagcagagtgaagatgtacctggagccatctcttctgccctggcagccatgtgtactgctcctgtggggctgcccagctgttgggatgccaaggagcaggtctcttggcatttggccaaccagctaactgaagacagcagccaactgaggccatccctcatctctggtctgcgacaccatgtcctgtgcctccaccttctcaaggttctctacgcctgctgctatattagtgagcgcctgtgccatattctggggcaagagcccctggccttggagtcgctgctgatgttagtccagggcaaggtgaaagtagcagattgggaagagtccactgaggtggcactttacctcctgtcccttcttgtctttcggctccaagatctgccttcagggatggagaagctgggcagtgaggttgctactctctttacccactcacatgtcgtctctcttgtgaatgcggcagcctgtctcttaggacagcttggtcagcaaggggtgacctttgacctccagccccgggaatggattgctgcagctgcacatgccttgtctgcccctgcagaggtccggctgactccgccgtatagttgtggcttctatgatggcctcctcattctcctgcttcagcttcttatgcaggtacaggggaagcctggcctgatcagggatgtggttggttcagaggtgtggaccattctgtggcaccgcttttccatggccctgaggctgcccgaggaggtgtctgcccaggaagacgacctgctactatcaagtccctccagcctagagccagactggacactgatttcaccccaaggcatggcagccttgctgagcctggccatggccatcttcacccaggagtcccagttatgcctgagccacctgtcccagcatggcagtgtcctcatgctgaccctgaagcacctgctttcacccagcttcttgcaccacctgagccaggcgccgcaggggcccgagtttctccccgttgtggtgctctccgtgtgcaagctgctctgcttcccttttgccctggatgtggatgctgacctccttgtaggtgtcttggctgacctcagggcctcggaagtggtagtctgcctgctgcaggtctgctgccaccacctttcgttgttacaagcagagctgcccattggcctccttacacgcctggccctcacggattctgcctctctcaagcagtttgtgaacacagtggccacctcttctagagccatcatctcattcctctctgttgttctcctgagtgaccagcccctcatgatctctgacctcctgtccctgctgacacacacagcccggattctgtcccccagccacttgtcctttatccaagagctcctgtctggctctgatgaatcctatcggccattgcgcagcctcctaggccactcagagaacactgtgcgggtccgtgcatatgggctcctgggacatttattacagcacagcatggccctacgtggggcactacagagtcagtcaggactgctcaaccttctgctgctagggcttggagacaaggaccctgccgtgcgacgcagtgccagctttgctgtgggcaatgcagcctaccaggctgggcctttgggacctgccttggcagctgcagtgcccagtatgacccagctgcttggagatgctcaggatgggatccggcgcaatgctgcatcagctctaggcaatctgggacctgaaggattgggcaaggagctattaaagtgccaagtaccccagcggctcctagaaatggcatgtggagaccctcagccaactgtcaaagaggctgccctcattgcccttcgaagcctccaacaggagtcctgtattcatcaggtgctggtgtcgctgggtgccagtgagaagttagccttgctctctttggggaatcagttactgccgaatagcagcaacaggcctgcctccgtcagacactgcaggaagctcatccaactcctgaggccaacccacagcacatgagcccgcactcctggggttacctccagccttcactgtcctactgttgccaagatttccttattctcctacccaagctactaactcagccaagagctgatgagactgagaaagagtgctgagctgccaactcccctccaagtgagaaactagaagagattttcttattaaagcttcctttccctagacttatgatgacttgaatcagtaaacttcatcactgttggtgcc

SEQ ID NO: 77 - DNA, 1807 bp, Mus musculus
ccacgcgtccgcggacgcgtgggcgagccgcgcttccggcgggcagcgccggggccctgcggagtcccgcctcgccgcccctcgagcgcccccagcttctctgctggccggaacctgcaccccgaaccaggaagcacctggcggcgggcgcgggatggctgggcccagctggggtctccctcggctggacggtttcatccttaccgagcgcctgggcagtggcacgtacgccacggtgtacaaggcctacgccaagaaggatactcgggaagtggtagccataaaatgcgtggccaagaagagtctcaacaaggcgtcagtggaaaacctcctgactgagattgagatcctcaagggcattcggcacccccatatcgtgcagctgaaagacttccagtgggacaatgacaatatctacctcatcatggagttctgtgcagggggtgacctgtctcgcttcattcatacccgcaggatcctgcctgagaaggtggcccgtgttttcatgcagcagttggctagtgccctgcagttcctgcatgaacgaaacatctctcacttggatctgaaaccgcagaacatcctgctgagctctttggagaagccccacctgaaactggcagactttggctttgcccagcacatgtccccgtgggacgaaaaacacgtgctccgtggctccccgctctatatggctcctgagatggtgtgtcggcggcagtatgatgcgcgtgtggacctctggtctgtgggggtgatcctgtacgaagccctctttgggcagcccccctttgcctccagatcgttctcagagctagaagaaaagattcgcagcaatcgggtgattgagctccctcttcggccccaactctccctagactgccgggacctgttgcagcgacttctagagcgggaccccgcccgtcgaatctccttcaaggacttctttgcccatccctgggtggacctggagcacatgcccagtggggagagcctggcacaggcaagggcccttgtggtggaggctgtgaagaaggaccaggagggggatgctgccgctgccctgtcgctctactgcaaggctctggacttctttgtacctgcgctacactacgaagtggatgcccagaggaaggaggcaattaaggcgaaggtgggacagtatgtgtcccgggcagaggagctcaaagccattgtctcctcctccaatcaggccctgctaagacagggcacaactgtccaagagctgcttcgagagatggcccgtgacaaaccacgcctcctggctgccctggaagtggcctcagctgccctggccaaggaggaggaagctggcaaagagcaggatgccctggacctgtaccagcacagcctcggggagctgctagtgctgttggcagcagaggccccaggccgaaggcgggagctccttcacaccgaggttcagaacctcatggctcgagctgaatacctgaaggagcagatcaagataagggagtctcactgggaagcggagagtctggacaaagaggggctgtcggagtctgttcgtagttcttgcacactgcagtgacaccggaaggagcagcggatggagcacaaccctagagagaagctgcattaccaactcaggttgacacctgcacacctgggaccttcctggacgagcagctcccacatgctggttcccagcattcctctgagtgttctccacccttggggcgtctggtggcaggtgtactaagctctgggagaattacttgaatgtgaccttgtcattaggtgactgctggtctaagcctgtccg

SEQ ID NO: 78 - DNA, 4076 bp, Mus musculus
ggtccaggggagttggccaggtcttcgggtgcctcggtttcctctgtccaagctgtggcctcgccgtggcaaggcagagcgcgtgcaactcgggtcccccaccatcgtgcaggagctagacatgctgttttaccgtatatgagcagtcgatcccagatatggaaaacttcgtcttgtatgaggagattggcagaggaagcaggactgtcgtatataaggggcgccggaaaggaaccatcaactttgtagccatcctttgtactgagaagtgcaaacggcctgaaataaccaactgggtccgcctcacccatgaaataaaacacaagaacattgtaacttttcacgagtggtacgagaccagcaatcatctctggttggtggtggagctttgcacaggtggttctctagaaaccgtgattgctcaggacgaaaacctcccagaagatgtcgtgagagagtttggggtggacctggtcacagggctgcaccatctccacaggctgggcatcctcttttgtgacctttctcctgggaagattctcttggaagggcctggaacactgaagttcagcaatttctgcctggccaaggtggcaggggagagtctggaggagttctttgctttggtggcagcagaagaaggaggtggtgacagtggagagaacgcactgaagaaaagcatgaagacccgagtcagaggctctctgatctatgcggctccggaaatcgtgaaggggactgaattctccgttaccagtgacctctggtctttgggctgtctactttatgaaatgttttcagggaaacccccattcttctcagaaacggtgtcagaactcgttgagaagattctgtatgaagacccattgccaccaatcccaaaagactcttcattccccaaagcatcctcagatttccttaacttgctggacggattgctgcagaaggatcctcagaaaagattctcctgggagggagttctgcagcacccattctggaaagacgccctgcggggagaagactcaggctgggcctccgaggactcccccttcagcagaaacgtcatggagtgttctggaccgcatgattccagagagcttttgcagagccctaagaatggacaagccaaagggcagaaggcagctcatcggctcagccagtctttcaggctagaaaacccaactgagctgaggcccaagagcatcatgggaggccagctgaatgaatccatatttctcctcagttcacggcccactccaaggactagtgccatggtggaattaaatcctggtgagggtgaggaccccagctcacctcagaagacttctcccttatccaagatgacaagcgggcacctgagccagggggccctggagtcccagatgagagagctgatctacacggactcggatcttgtgatcaccccaattatagacaatccgaagataatgaaacaacctgcaatcaagtttgatccaaaaatcttgcacctaccagcatattctgtggagaagttgctggtcctcaaggaccaagactggaatgacttcctgcagcaggtgtgctcccagatcgactccagcgagaagagcacaggggcgctgcgggccaagctgaacctcctgtgctacctgtgtgtggtggccacgcacaaggaggtggccaccaggctgcttcactccccgctgttccagttgctaatccagcacctgcggatagctcctaactgggatatacggtccaaggttgctcgggtggtcggcatgctggccttgcacacaaccgaacttcaggaaaatgtgcctgttatcgaggcgatcacactcttaactgaattaatccgggaaaatttcaggagtggcaaactgaagcagtgcctcctgcccacccttggacagcttctctaccttgtagccacccaggaagaaaaaaatcagcactccagggattgctgggccgtccccctggctgcatacactgtgcttatgaggtgcctccgggaaggggaggaacgggttgtcaatcacatggctgcgaagattatcgagaatgtttgcacgacgttttctgcccaggcgcagggcttcacaaccggggagattgggcctgtcctgtggcacctctttagacactccaccgtggacgccctgcggataaccgcgatatcggccctgtgcaggatcacacggcagtctcccaccgccttccagaatgtcatcgagaaggtgggtctcaatgcagtcatcagctccctggcctctgccatctgcaaagtgcagcagtacatgctgaccctgttcacagccatgctgtcctgtgggattcatctccagcggctgatccaagagaaggacttcgtctctacagtcatccgcttacttgatagtccgtccactcccatcagagccaaagccttcctggtgctgctgtacatcttgattcataaccgggacatgctgctgctgagctgccaagccaggctggtgatgtacatcgagagagacagcagaaagacctccccaggcaaggagcagcagagtgggaatgagtacctggccaggtgcctggacctcctcatccagcacatggtacaggagccacctcggatcctaggcgacattctcaacgccctggcaaacgtgtccggccggaagcacccatccacggtccaggggaagcagctgaagatgtgtctccccatgatgcctgtggtgcttcacctggtgatgtcacaggtatttcgacctcaagttgtgacagaagagtttctcttcagctacggaactattcttagtcacattaagtcaattgacttgggggaaacgaacatagacggagccataggcatcgtggcatctgaggagtttatcaaggtcaccctgtcggcattcgaagcagtgatccagtacccggttctgctggccgactaccgctcgacggtcatggattatattttgccgcccttggtctccttggttcaaagccagaatgtggaatggagactcttcagcttgcggttgctctcagagaccacaaccctgctggtgagccaggagccggaggacggtgatgaagaggccagttgcgattctgacagcagtcttctggcgctcatcagagatgagctgctaccccagtatgagcacatcctcatggagcctgaccccgttcctgcctatgcgctgaagctgctcgtcgccatgacggaacacaaccccgctttcaccaggcttgtggaagaaagcaaactggtcccgctcatttttgaagtaattttggagcatcaggagagcattctgggtaataccatgcagagtgtgattgcgttgctcaacaatctggttgcctacaaagactcaaacatgcagctgctttatgaacaaggactcgttggtcatgtctgtaacatgttcacagaaactgccactctgtgcttggacagggacaataaaaccaacacggagccggcgtccacactgctggcctccctgctcgacatcctactgggcatgctgacctacacttctcgaatcgtccggcaggctttgcaggtccagaagtcaggctcaagaggggacacacaggctgcagaggacctgctgcttctcagcaaaccactcacagacctcatcagcctgcttatcccactgcttcccagcgaggaccctgagatctccgaggtctcatccaagtgcctgtccatcctggtgcagctgtatggaggcgagaaccccgagagcttgtccccagagaacatggtgacctttgccaacctcctgatgaccaaggaggaccccaaggaccagaagcttctgctgaggatcctcaagaggatggtaacgtccaatgagaggctcttggaaagcctcaagaacaccggcagccttctgcaggccctggagcgcctggctccagctcacagctcacccgtcgacactatcgtggcttccttggccctggaactcctccaggcagttgggcattagacacggccatcctgtggcacagtgtggtcagatcccacaccatcctttctcaccagtctcaagtggagctaataaaatcaatgggccaga

SEQ ID NO: 79 - DNA, 4777 bp, Mus musculus
gaagtgaggtcaacccggaggctttcccgggagttcagcgtttgccgcaggtgaagtcgtcttcctggacgggcactgtccctgtccctgtccctgtccagggctgctgcaaaggccctgggatccggggactcgaacccgcgggggcccagggcggcaggggaggagccggcagcgaggctgctgggtgtccggagtcccgagtgtgtttgctctcccagttgttcacccccagctctagatctcggacgtgtctgcgctcctgccccaactaccccggtcccgtgtctgaaagaagacccctcacagaaaacattctcctggccggcttccgttcacgcccaagcccctcggagctctgccaagacctccctgggatctttcagcgacttttgagttgccagaggcctggggtgttctgtgttaagctgctgtcccagaggtgctgggcattatgggaaatcagctggctggcatcgctccttcccagatcctgtctgtagagagttatttctcagacatccatgactttgagtatgataagagcctgggaagcactcggttttttaaagtcgctcgagccaagcaccgggaaggcctggtggttgtgaaggtctttgcaattcaggatcccacgttacccttaactagttataaacaggagctggaggaactgaaaatcaggctccactccgcccagaactgcctccccttccagaaagcagcagaaaaggcgtctgagaaagcagccatgctgttccggcagtatgtgagagacaacctctacgatcgcatcagtacccgcccgttcctaaacaacatcgagaagcgctggatcgccttccagatcctgacggccgtggaccaagcgcacaaatctggagtccgccacggagacatcaagacagagaatgtgatggtcaccagttggaactgggtcctcctaaccgacttcgccagttttaagcccacgtatcttcccgaggacaacccagcggatttcaactatttctttgacacctcgagaaggaggacatgctacatagctcccgagcgcttcgttgacggtgggatgttcgccaccgagttagagtacatgagagacccctcaaccccgcttgtcgacctgaatagcaatcagagagcgcggggagagctgaagagagccatggacatcttttcggcaggttgcgtgatagctgagctctttacggaaggcgtacctttgtttgatctctctcagctgctggcgtatagaaacggacattttttccctgaacaagtgctaaacaaaattgaagatcgcagtatcagagacttggtaactcagatgattaaccgtgagcccgagaagcgtttggaagctgaggactacctgaagcagcagcgaggcaacgccttccctgagatattttatactttccttcagccttacatggcccagttcgccaaggaaacctttctctctgcagatgagcggattttggttatacggaaagatttgggcaacattattcacaacctctgtggacatgatttgccagaaaaagcagaaggggagtccagggccagtggtctggttgtcctggtgtccgtgataacgtcctgcctgcagacactgaagtcctgcgactccaaactggccgccttggagctcatcctgcatctggcccccagactgagcgtcgagatccttctggatcgcatcactccctacctgttgcatttcagcaatgactctgtcccaagagtgcgggctgaagccctgaggacactcaccaaagtccttgcccttgtccaagaggttcctcgcaacgatgtcaatatctatccagagtatattctccccggcatagcccacctggcccaggatgacgctaccatcgtcagactggcctacgctgaaaacatagctctgttggccgagacggctctgcgattcctggagcttgtgcagctgaaaactctcaacatggagaacgagcccgataacgaggaggtagatgaagccacgcgtcctaacggagactatgacacagagctccaggccttgcatgagatggtccagcagaaggtggtcacgttgctaagcgaccctgagaatatcgtgaaacagacgctgatggagagtgggatcacacgcttgtgcgtcttcttcggacgccagaaggccaacgacgttctcttgtcccacatgatcactttcctcaatgataagaatgattggcacctgcgtggagctttctttgatagcatagtcggtgtggctgcctacgttggctggcagagctcctctatcctcaagcccctgctccagcaaggcctcagcgatgctgaggagtttgtcatcgtgaaagctctcaatgccctgacctgcatgtgccagctagggctgctgcagaaaccccatgtctacgagttcgccagtgatattgctcccttcctgtgtcaccctaacctgtggatacgctatggcgctgtgggatttatcacggtggtagctcatcagatcagtactgctgatgtctactgcaagctcatgccgtatcttgacccgtatattacacagccagtgatacagattgagaggaagctggtcctgctcagtgtgctaaaggagccggtgagccgctccatatttgactatgctctgaggtcgaaagacatcgccagcttgttcagacatctccacatgcgccagaagaagcgaaatggctctcttctcgactgccctccacctgaggaccccaccatagcgcaacttctgaagaagttgctctcacaggggatgactgaagaagaggaagataaacttctggcactgaaggacttcatgatgaaatcaaatcgagccaaagctaatgcggtagaccagagccacctccacgacagcagccagaaaggtgtaatcgacttggccgccttaggcatcactgggagacaagttgatcttgttaaaaccaaacaagaaccagatgagaaacgtgctaggaaacatgtgaaacaagactccaatgtaaatgaagagtggaaaagcatgtttgggtcattggagccaccgaatatcccacaggccctgcctaaaaccagtgaccatgaggttgttcagcctgggaagccacctcgctctgagtcctctgctggtatctgtgtccctttgtcaacgtctccacaggtctcagaagcagctcacatcccaagtaagaagcctgtgatcccggttgtgagtagcacggtcctgccgtccacttaccagatccggatcaccacgtgcaagactgaacttcagcagctcatacagcagaagagggagcagtgcaacgcggagcgcatagccaagcagatgatggagaatgccgagtgggagagcaagccacctccacctgggtggcgtcctaaagggctgctagttgcacatcttcatgagcacaaatctgctgtgaatcgcatcagagtctctgatgaacacttactttttgcaacatgttcaaatgatggcacagtgaagatctggaacagccagaagatggaggggaagaccaccacaacgcggtctattctcacgtacagccgaattggaggacgagtcaagacgctaacgttttgccaaggctcccactacttggccatagcatctgataatggtgctgtccagcttcttggaattgaggcgtctaagttacccaagtctcctaaaattcaccctctacaaagcaggattctggatcagaaggaagatggctgtgtggtggacatgcatcacttcaactccggggcacagtccgttcttgcctatgccacggtgaatggctctctggttggatgggatctcaggtcttcaagcaacgcgtggacattaaagcatgacctaaagtcaggcctcatcacttcctttgccgtggacatccaccagtgctggctgtgcataggcacgagcagcggtgccatggcgtgttgggacatgaggttccagttgcccatctccagtcactgtcatccctccagagctcgcatccggcgcctctccatgcaccccctgtaccagtcctgggtaatcgcagctgttcagggcaacaatgaagtctccatgtgggacatggaaactggcgacaggagactgactctctgggccagcagcgcaccgccactgtctgaattacagccttcaccgcacagcgtccatggcatctactgcagccctgcagatggaaaccctatcctgctgaccgctggctcagacatgaaaataaggttctgggacttggtttccccagagaggtcctatgttgttgcgggaagtacaggttccccgtctgtctcctactacaagaagataatagaaggcaccgaggttgtccaggaaattcagaataagcagaaggttggaccgagtgatgatacccctcggaggggcccggagtctctgcctgtgggacatcatgacatcatcacagacattgccaccttccagaccactcagggcttcattgtgactgcttctagagacggaattgtgaaggtgtggaaataagtcctgccgacttgtataaaatgctgtaaaattcgaaatgtaccatagctcaggacacgaaggacttctagagaacaaacgtgggttttgaagtgactgttactgtttcatggctgagcaaatcccagccacagtggggaaggatgtaggcatggtgactttcttcatgtgcatctctgaagaactggccagatagcacaacctgggagcgcttgctgcatatggaacagaacaggtgagaagtgt

SEQ ID NO: 80 - DNA, 1708 bp, Mus musculus
atggccgacacagagactgaccagggactgaacaagaaattaagcttctccttttgtgaagaagacactgagagtgaagggcagatgactgcacaagacatcggaggggcccagagccaaaagcctgggagggaagaaagtgaggagttggagggtcccgtgcctcctaccagagatgaacttcatacttctctgagcagagacaaggaaagtccaggtcctgatctttggaaatcagtttcaggccctcccaaatgcccagagacaccagtattacacagcaagagcaagctgccagtccctaccaacttctccactcccaaaaattcgctgggtcagccagagatttctctgctagagaagctctcctcccgaagctctagacatatgaggctcacacctgcttcccttatggatgagaagacctctttgtctctggtcaatatcaacccattcactccggagacctacagaaaattactccttcaatcaaagggcaagaggaagaccagagactatcttgaggaaactggagaagaggaaagcaaatcagtacagtggctgcctgctaagagaagtattctacaagaaactaatatggcttcccgctatgaaaaagaattcttcgagatagaaaaaatcggggttggagaatttgggacagtctacaagtgcattaagaggctggatggatgcatttatgcaataaagcgctctgcaaagtccttttcaggattatcaaatgaattggatttgcatgaagtttatgctcatgcagtgcttggccatcatccccatgtggtacgctactactcatcatggatagaagatgatcatgtggtcattcaaaatgaatactgtaatggtgggagcctgcaagctgctatatctgaaaacactgcgtccaataatcacttccaagagcccaaactcaaagacatccttctgcagatttccttgggacttaagtacatccacaattctggcatggtacacctggacatcaaacccagtaacatcttcatttgtcataagatgcagtgtgactctcctgtaggcccagaagaggctgaaagtgaagctgactggtttctcaatgccagtgtgatgtataaaattggtgacctgggccacgcgacatcaatcagcaaacctaaagtggaagaaggagatactcgtttcctggctaatgagatcttgcaagagaattaccaacacctccccaaagcagacatatttgccttaggattaacaatcgcagtggctgcaggagcagagtctttacccatcaatggtgacatgtggcatcatatccgcaaagggaactttccagagatttcccaagagctctcggatgacttttatggtctactcaagaacatgatccacccagctccaaaggagagaccatctgcagcagctctggccagaagtcgaattctctggcctttcttggagaagactgatgaactccagaaacaactgaatttggagaaatccaagacagccacactgaaaagggaactgaaaaaagctcggcatatccagacccctcagagagaagtccaccattgttattatcagatctgcaaaggctcaagacacctcctggtgggaggaaggaggaaggcgccctcaagcttcacccgtgggacatcctccgtgtaggaactcacttctggccttttgctacacaacacagcctttt

SEQ ID NO: 81 - DNA, 6432 bp, Mus musculus
atggaagccgggcgcggcacggggtcggcgggcatggcggagccgcgggcgagggcggcgcggctcgggccccagcgcttcctgcggcgcagcgtggtggagtcggaccaggaggagccgccgggcctggaggcggccgagacgccgagcgcgcagcccccacagcctctgcagcgcagggtgcttctactctgcaagacgcgccggctcatcgcggagcgcgcccggggccgccccgccgcgcccgcgcccgccgcgcccgctgcgcctcccggctcccctagtgtcccctcggaccctggcccggagcgagcgggcacgcaggagcccagcccagatcccaccaccgcctcagccgcagccgcgcaggtccccgacggcggcccgaggcaggaagaggcgccggccccaacacaggaggacgctggaaccaccgaggcaaagccggagcccgggcgcgcacgcaaggatgaacctgaagaggaggaagacgatgaggacgacctcaaggccgtggccacctctttggacggccgcttcctcaagttcgacatcgagctgggccggggctccttcaagacggtctacaaggggctggacacggagacctgggtggaggtagcatggtgtgaactgcaggaccggaagctcaccaagcttgaacggcagagattcaaagaggaggcggagatgctgaaaggtctacagcaccccaacattgtgcgcttctatgacttctgggagtccagtgccaagggcaagcgatgtatcgtgctggtgacagagctgatgacctcgggtacactgaagacgtacctgaagcggttcaaggtgatgaagccgaaggtactgaggagctggtgccggcagatcctgaagggcctgctgttcctgcatacaaggacaccccccatcatccaccgtgacctcaagtgtgacaacatcttcatcactgggcccaccggctctgtgaagattggtgacttgggtctggccacccttaaaagagcgtcttttgccaaaagtgtgataggtacccccgagttcatggcacctgaaatgtacgaggaacattacgacgagtcggttgatgtctacgccttcgggatgtgcatgctggaaatggctacctcagagtacccctattcggagtgccagaacgccgcccagatctatcgcaaggtcacctgtggcatcaaaccggccagcttcgagaaggtgcatgatccggagattaaggagatcatcggggagtgcatctgtaagaacaaagaggagaggtatgagattaaggacctgctgagccatgccttcttcgcggaagacacgggtgtccgggtggaacttgccgaggaggaccatggcaggaagtctaccatagccctgcggctttgggtggaagaccccaagaagctgaagggcaagcccaaagacaatggagccatagagtttacctttgacttggagaaggagactcccgacgaggtggcccaggaaatgatcgattctggatttttccatgagagtgatgtgaagattgtggccaagtccatccgtgaccgggtggcactgattcagtggcggcgtgagaggatctggcctgcactgcagtctcaggagccaaaggactctggcagccctgacaaggccaggggtctgccagcacccctgcaggtccaggtgacctaccacgcacagagtgggcagcctgggcagccagaacctgaggagcctgaggccgaccagcatctcctgccccctaccttgccagctagcgttacctccttagcctcggacagcacctttgacagtggccagggctctaccgtgtactcggactcccagagcagccagcagagcatggtgctcagctcgcttgtggacacggccccaaccccagcctcgtgcgtgtgcagcccccctgtgagtgaggggcctggcctgacccacagcctgcctacgctaggggccttccagcagccggccactgtgcctggcctgtctgtgggccctgtgccaccccctgcccgccctccactcctccagcagcattttccagaatcttccatgagcttcacccctgtgctgccaccacccagcacccctgtgcccacgggcccaagccagccagcacccccagtccagcagcctcttccaatggcccaaccacctaccctgccacaggtcctggccccacagcccatgggcactgtccagccagtaccctctcatttgcctccatacctggctccaacctcccaggtcgtggcccctgctcagctgaagcctctccagatgccacagccacctctgcaacctcttgctcaagtccctccgcagatgcctcagatgcctgtggtcccccccatcacccccttaacaggactcgatggcctccctcagaccctcactgacctgccggccgcaaacgtggcccccgtgccaccacctcagtatttctcacctgctgtgatcttgccaagcctcacaacacccctgcccacatcaccggccctgcctatgcaggctgtcaagttgcctcatccccctggaacacccctggctgtgccctgtcagaccatcgtgccaaatgcaccagctgctatccccctgttggccgtggccccgcagggtgtggctgcactgtctatccatccagcggtggcccagatcccagcccagcctgtgtacccagcagcctttccacagatggtacctggagacatcccaccctcaccccaccacacggtgcagagcttacgggccacccctccacagctggcctcacctgtgcctcctcagcctgtccagcccagtgtcattcatctacctgagcaggctgctccaactgctgcctcagggacccaggtcctgctgggccaccctccttcatacaccgcggacgttgctgctccagtctctgctgtgtccctgccgcctgctgtcctttcccctcctctgccagatactctgctgcctactgtccctgacctcctgcccaaggtccccagctctctggcccctacagtggtcgcagcctctcagagtgcgcccgcacagacctcttcactcctcctgccaacaaacccacccctgcccactgggcctgcagttgctggcccctgccctgcagtccagctgatggtggaagtggctcaagaggagcaggtctcacaagacaaaccccctggccccccacagagctccgagagctttggaggttctgatgtcacctctggaagagatctgagtgacagctgtgaaggcacctttggagggggcaggctggagggaaggaccgcccggaaacaccaccgtaggtccactcgtgcacgctcgcggcaggagagggccagccggccccggctcactatcctaaatgtgtgtaacacgggggacaagatggtggagtgtcagctggaaacgcataaccataagatggtgaccttcaagtttgacctcgatggggacgctccggatgagattgccacgtacatggtagagcatgactttatcctgcccgctgagcgagagaccttcatcgagcagatgaaggatgtcatggacaaggcagaagacatgctcagtgaggacacagatgctgaccatggctctgatacagggaccagccctccacacctgggtacctgtggtctggccacgggggaggagaacagacagtcccaagccaatgcccctgtctaccagcagaatgtcttacacacgggaaagaggtggtttatcatctgtccagtggctgaacacccagcaacagacacttctgaatcatcacccccacttcctctaagctccttgcagccagaagccagccaagacccagcgccctatccagaccagctgtccttgacggacaaacctagtttcccagctgctcagcagctcctgagccaggcaggctccagcaaccctcctggtggagcatcagcccccttggccccgtcttcccctcctgtgactactgtaatcccggcagcaccagccaccagcaccgtgccagagtcagcagcagggactgccatgcaggcaggaggtccagggactcatcaaggaccagccagtgtccatgagaccctccagccactggccgagacacgctctgcccagtgtactgcccagccccttagtactggccaaggaccttgcaccccagctctggaagcctctcgctgctccacaggtctgggggagcccatctcaaccagggaggtcagcactcaaggagagcccctgcctgcttcagtgccagaacctagccctcccactggggccacacaatctgtaccgggtcagccaccacccccactgcccatcacagtaggggctatcagtctggcagctccccagctccccagtccccccctgggacctactgctcccccaccacccccctcagccttggaatctgatggggaagggccgccccctagggtgggcttcgtggacaacaccatcaagagtctggatgagaaactgcggactctgctctaccaggagcacgtgcccacctcctcagcctcagctgggacccccatggaggcaagcgatagagacttcaccctggagcccctgcgaggagaccttccctcagccttgagtgacaagaccccaagcctcacccagcagacccagccctcattggaaaagtctgaaacggcccctgcaggatgggccctggcccagagggaacagggtgcatcttctccaatgacagcagagtcatcttccagcaatacactgggctgtgacagtgacgcagggcaggtggcctcggactcctccacagcacccagtgtcccccaggatgcctctggttcttccgtccctacacacatggatcccaaagatcagaacagtagtgttcccagagaagccttggcagcacccatgcaaagtggcccagggtccttcacagtgggcagcccagcccagctgcgtggcgcccgggactccgggtctcctcataagcggccagggcagcaggacaacagttctccagccaaaactgtagggcgcttttccgtggtcagcacacaggacgagtggactctggcgtcacctcacagcctgcggtactctgccccacccgatgtctacctggatgagatcccctctagccctgaggtgaagctggcagtgcggcgggtacagacagcctcctccatcgaggttggcgttgaggaacctgcctctagtgactctggggatgaacgcccaagaaggaggtcccaggtgcagaagcagtcctccctgccgggtactggtggtgtggcaagtgactttgtgaagaaggccactgccttcctgcacaggtcttcaagggctggctcgctgggacctgagacacccagtagggcaggtgtgaaggtccctaccatcagcatcacctccttccactcccagtcatcctacatcagcagtgacaatgactcagagtttgaggatgcagacataaagaaggaactgcgcagtctgcgagaaaagcacctgaaggaaatctcggagctacagagccagcagaagcaggagatcgaagccctgtaccgacgcttgggcaagccgctccctcccaatgtggggttcttccacactgcaccccctatgggccgcaggaggaaaaccagcaagagcaaattgaaggctggcaagctgctgaaccccttggtgcaacagctcaaggtcgtggcctccagcacaggtcatttgtctgactccagcagaggccctcccactaaggaccctgcccacgccagcacgcccccgggcaccaaggcagttcagacccagcagccctgctccgttcgggcctctctgtccacagacatctgctccggtttagccagtgatggaggcggagcgcgtggccaaggctggacggtttaccacccaacgtctgagagaggggcctataagtctagtagcaagcctcgtgctcgattcctcagtggacccgtatctgtgtccatctccctgaagcgtctctgcctaggcaaagaacacagcagtaggtcttccaccagcagcctggccccaggccctgagccaggtccccagcccaccctgcacgtccaggcgcaggtgaacaacagcaacaacaagaaaggcaccttcacggacgacctgcacaagttggtggacgagtggacaacgaagaccgtgggggcagcgcaagtgaagcccacgctcaaccagctgaagcagacgcagaagctgcacgacatggaggcctctggagacgctcgggctacatctgtgcctcgagcagcagtgggggcatcgtgtctggccccggcccctggccctctgtccaccacagccactcctggagccactccagccctgcctgtgcccataccagtgtttctacggccacctgttatcagcacaccaggcccccggctgcacatcacgtag

SEQ ID NO: 82 - DNA, 7658 bp, Mus musculus
gcccgccgtaggagcgctgcccagcacttcttggtggcttctccgggtcacccttttcccttttcattcataaatccgagcccgcattcttcactccatcggaccgaccatgtctgacggtgccgccgagaagcaaagcggcactccgggcttccttacgcctccggcgcccgtccccaagaatggctcaagctccgattcttccgtgggcgagaaactgggggctacggtcgccgactcgggagttggcaggacggaggaatatcggcgccgccggcacactatggacaaggacagtcgtggggcggccgccaccaccacccccacggagcaccgattcttccgccgaagcgtcatctgcgactccaatgccaccgcgttggagctgccgggcctccctctctctatcccgcaacctagtgtacctgcagtggtgccccagagtgctccacccgaacctcacagagaggaaactttgaccgccaccgttgcttcccaggtgtctcagcaaccctcggctgctgcctcccctggggaacaagccgttgtaggctcggccaccacgaccgtccccagcagtaccagcaaagaccgcccggtgtcccagcccagcctcgtggggagcaaagaggagccaccgccgtccagaagtggaagtggcagtggtggcgccagcgccaaagaggcgcaggaggataggagccagcaacaggatgatatcgaagagctggagaccaaggcagtgggaatgtccaatgacggtcgctttctcaaatttgacatcgaaatcggcagaggctcctttaagacagtctacaaaggtctggacaccgaaaccactgtggaagtcgcctggtgtgaattgcaggatcgaaagttaacaaaatctgaaaggcagagattcaaagaagaggctgaaatgttaaagggtcttcaacatcccaacattgttcgattctatgattcctgggaatccacagtaaaagggaaaaaatgcattgttttagtgactgaactaatgacatctggaacacttaagacgtacttaaaaaggtttaaagtgatgaaaatcaaagttttaagaagctggtgtcggcaaatccttaaagggcttcagtttctccacacacgaactccaccaattattcaccgggatcttaaatgtgacaacatctttatcactggtcctactggctcagtcaagatcggagaccttggtctggcaactctaaagcgggcttcttttgccaagagtgtgataggtaccccagagtttatggctcctgagatgtatgaggagaaatatgatgaatccgttgatgtttatgcttttgggatgtgcatgcttgagatggctacatctgaatatccatactcagaatgccaaaatgctgcgcagatctaccgtcgagtgaccagtggagtgaagccagccagttttgacaaagtagcaattcctgaagtaaaagaaattattgaaggatgtatccgacaaaacaaagatgaaagatattccatcaaagaccttttgaaccatgcctttttccaggaggaaacaggggtacgggtagaattagcagaagaagatgatggagaaaagatagctattaaattatggctgcgtattgaagatattaagaaattaaagggaaaatacaaagacaatgaagctattgagttttcctttgacttggagagggatgtaccagaagatgttgctcaagaaatggttgagtctggttatgtctgtgaaggtgatcacaagaccatggctaaagctatcaaagatagggtgtccttaattaagagaaaacgagagcagcggcagttggttcgagaagagcaagaaaaaagaaaacaagaagagagcagtttcaaacagcagaatgaacaacaagcaagcgtttcccaggcaggaatccagcagctctctgctgctagcactggcatacccactgctcctgccacctctgcttcagtttctacacaggtagaacctgaagaacctgaggcagatcaacatcaacagctgcaatatcagcaacctagtatatctgtgttgtctgatggaaccattgatagtggtcaaggatcatccgtattcacagaatccagagtgagcagccaacagactgtttcctatggttcccaacatgagcaggcacattctactggcacagcaccaggacatacagtttctagtatccaagcacaatctcagccccatggggtgtatccaccctcaagtatggcacaggggcagaaccagggccagccatcaagtagtttggctggggttctatcttcacaacctatccaacatcctcagcagcagggaatacagccaactgttccttctcaacaggcagtacagtattcacttccacaagcagcatcttccagtgaaggtactactgcacagccagtgagtcagcctcaagtgtcagctggaacacagcttccagtttcccagacagtagcaactgtccaaggtgaacctcacatcccagtttcaacacaaccctcagttgttccagtccactctggtgctcatttccttcctatgggacagccaatccctacttctttactcccacagtatcctgtctctcaaattcccatatcgactcctcatgtgtccacggcgcagacaggtttctcatccgttcctataacaatggctgctggcattaaccagcctctgctcaccttggcttcatctgctacagcatcttcaatcccagggggatcacctgtagttcctaatcagcttccaactcttctgcagcctgtgaatcagctgcagagtcaggttcacccacagcttctacagccaacaacagttcagtccataggaataccagctaaccttggacaagctgctgagggtccacttccctctggagatgttttgtaccagggcttcccatctcgactgccaccacaatacccaggagattcaaatattgctccctcttccaacgtggcttctgtttgcatccattctacagtcctagcccctccttctatgccgacagaagcattggccacccaaggttactttcctacagtagtgcagccttatgtggaatcaactcctttggttcctatgggcagtgtaggaggccaggttcaagtgtcccaaccagcagtgagtttaacgcaacaacccccaactacatcctcccagcaagcagttctggagagtactcagggagtctctcaggctgctcctccagaacaaactccaataacacagtcacaacctactcagcctgttccattggttacctctgcagacagtgcacattcagacgttgcttctggtatgagtgatggcaatgagaatgctccatcatccagcgggaggcatgaagggaggacaacaaaacggcattatagaaaatccgtaagaagtcgctctcggcatgaaaagacttctcgcccaaaactgaggattttaaatgtttcaaataaaggagaccgagtagtagaatgtcaattagagactcataatcggaagatggttacatttaaatttgacctagatggtgacaaccctgaagagatagcaacaattatggtgaacaatgactttattctagcaatagagagagagtcttttgtggctcaagtgcgggaaattattgaaaaggctgatgaaatgttaagtgaggatgtcagtgtggagcctgagggtgaccagggattggagagtctgcaaggaaaggatgactatggcttcccaggttctcagaaattagaaggagagttcaagcaaccaattgctgtatcttccatgccacaacaaataggtgttcctaccagttctttaacgcaagttgttcattctgctggaagacggtttatagtgagtcctgtacctgaaagtaggttacgagaatcaaaagttttcaccagtgacatatcagatccagttgtggcctctacatctcaggcccctggaatgaacttatctcactctgcttcatccctcagtctccagcaggctttttctgaactgaaacatggtcagatgactgaaggacccaatacagcacctccaaattttaatcacatggcgggaccaacattttctccctttttggctagcattgctggtgtccaaactgtagcagcatccacaccgtcagtatcagtccctataacaagcagtcctcttaatgacatttccacatcagtgatgcagtctgagactgcactgcccactgaaaaaggcatcgtgggagttaccactaccagcacaggtgtggtagcttcaggtggtctcaccacaatgtctgtgtctgagtcaccaacatcttccagtgcggtttcaagttctacagtacctgcagttgtcactgtgtccacaccatcccagccagttcaggcttccacatctgggagcattgcttcaagtacaggcagttttcctcctggaacattttctacaactacagctactacaatgggtagtgtggtggccccagatgctaagcctccaactgtattattgcaacaggtagcaagcaatactgctggggttgccatagtgacatcagtctctaccaccactccattcccaggcatggcttcacagccatcccttccacttagtagcagcacctctgctcctactctagctgaaacaatggtggttagtgcacactcactagacaaggcatctcacagtagtacagcaggattgggtttgtccttttgtgcgccatcctcttcctcctcctctggaacagctgtgtctacttctgtttctcagcctggtatggttcatcctttggtcatctcatcagctgtagtttctacacctggcctcccccaaccagtagtacctacttctacacctttattaccccaagtacctaatatcccacccttggtacaacctgttgttaatgtgcctgctgtacagcaaacactcattcacagtcagcctcaaccagctctgcttcccaaccagcctcacacacactgtcctgaaatggatgctgatacccaatccaaagctcctgggattgatgatataaagactctggaggaaaagctgagatctctctttagtgaacacagctcatctggaactcagcatgcttctgtctccctagagacacctttagtagtagagacgactgtcacaccgggcatcactaccactgctgtagcaccaagtaaactcatgacttccactacaagtacttgcttaccaccaaccagtttaccattaggagcagctggcatgccagttatgccagtaggcacacctgggcaggtttctaccccaggcacacacgcttcagccccagtcggcactgcaacaggagtaaaacctggaacaactcccccaaagccaactaagactgtggtgccaccagtgggtactgaactttcagccggtactgtaccctgtgagcagctgccaccttttcctggaccttctctaattcagtcccagcaaccactagaagatcttgatgctcagttgagaagaacacttagtccagagactattacagtggcacctgcagttggtcctttgtctacgatgtcttcaacaacagttacagaagcagggactcggcttcaaaaggatggcacagaaggtcatgtcacagcaactagttcaggagctggtgttgttaagatggggcgatttcaggtttcagttacaatggatgatgcccagaaagaacgtaaaaataggtcagaagatacaaagtcggttcattttgaatctagcacatcagagtcatcagttctttcaagtagtagtccagagagtaccctggtaaagccagagcctaatggaattagtatttctggcatctccttagatgtcccagacagcacccacaaagcacctaccccagaagcaaagtcagatgcaggacagcctaccaaggtgggacgttttcaggtgacaactacagccaacaaagtgggtcgtttctctgtttcaagaactgaggacaaggtcacagagctcaaaaaagagggaccagtgacctctcctcctttcagagattcagaacaaactgttattcctgctgtgataccaaagaaggagaagcctgagctggcagaaccttcccatttgaatgggccatcttcagacctggaggctgcctttctaagtaggggtacagaggatggctcaggtagtccacactctccccctcacctgtgttcaaagagccttcccgtccagaatctaagtcaaagccttagtaattcattcaactcctcatacatgagtagtgacaatgagtccgacattgaagatgaagacttaaggttagaactacgacgactacgagaaaaacatcttaaagagattcaggacctgcagagtcgccagaagcatgaaattgaatctttgtatactaaactgggcaaggttccccctgctgtcattattcccccagctgctcctctgtcggggagaagaaggagacccactaaaagcaaaggcagcaagtctagtcgcagcagctcattgggcaataaaagcccacagctttcaggcaacctgtctggtcagagtggaacttcagtcttacacccccaacagaccctccatcccgcaggaaacacccccgagactgggcacaaccagctgttacagcctcttaagccatctccctccagtgacaacctctattcagcctttaccagtgatggtgccatttcagtaccaagcctttctgctccaggtcaagggaccagcagcacaaataccgttggaggaacagtgagtagccaggctgcccaggctcagcctcctgctatgacttccagtaggaagggcacattcacagatgacctgcacaagttagtagacaactgggcccgagatgccatgaatctttcaggcaggagaggcagcaaaggacacatgaattatgagggccctggaatggcaaggaagttctctgctcctgggcagctgtgtgttcccatgacctcaaacctgggtggctctacccccatctctgcagcatctgctacctctctaggtcacttcaccaaatccatgtgtcccccacagcagtatggttttccacctgccccatttggcactcagtggagtggaacaggtggtccagcaccgcagccacttggccagttccaacctgtaggaacagcatccttgcaaaatttcaacatcagcaatttgcagaagtccatcagcaaccccccaggttccaatctacggaccacctagtcagcagcaaggatgttaactgagtagatttgggggcaggaaatggaatgctgggggggtgggggggtggggaagtagcctatatactaactactagtgctgcatttaactggttatttcttgccagaagggaatgtttttaataccattttgagccctcagaatggagaaccaccctccttctccgtttgttggagttaaaacaagaaggaatgaacagctttctggtggaggggctgcttgagactgcttttctgtttttgtacccctcagtaaggcctagaactagaagagaaccttgttaccagaaagccccaagagctcaatgtaagccaaacccgatctgtatctgtaagtgggcagagctcttaatttgacatgtgtcccaatccttatgcctcaaaatgcacactaa

SEQ ID NO: 83 - DNA, 5256 bp, Mus musculus
atggccactgattctggggagccagctagcacagaagattctgagaagcctgatggagtttcctttgaaaacagggctgcccgggctgttgcccctctgactgtagaagcgagaataaaggaaaaatacagtaccttttctgcttccggggaaaacatcgaaagaaagaggtttttccgaaagagtgttgagatgacagaagatgacaaagttgccgaatcttcccgcagagatgaaagaaaagctgcaacaaatatttcaagagtagataaagttcctacaaatgtgctaagaggtgggcaagaagttaaatatgagcaatgttcaaaggcaacctcagaatcctcaaaagattgcttcaaggagaaaactgaaaaggaaatggaagaagaagcagaaatgaaggctgttgcaacttcccctagtggcaggttcctgaaattcgatatagagctgggaagaggagcatttaaaacggtatataaaggattggacactgagacatgggttgaagttgcttggtgtgagctacaggaccgcaaattaactaaagctgagcagcaacggttcaaagaagaagcagagatgttgaaaggcctccagcatcccaatatagttcgattctatgattcatgggagtccactttgaaaggaaagaaatgtattgtgttagtgactgaactaatgacatcaggaaccttaaagacgtacttaaaacgatttaaagtcatgaaaccaaaggtcttaagaagctggtgcaggcaaatcttaaaaggattgcagttcttacacacaaggacgcctcctattattcaccgggatctgaaatgtgacaacattttcatcacaggacccactggatctgtgaagattggtgatctgggacttgcaaccttaatgcgcacatcgtttgctaagagtgtcattggcactcctgaatttatggctccggagatgtatgaagaacactatgatgaatctgtagatgtttatgcttttggaatgtgtatgttggaaatggctacttcggagtatccatattctgagtgccagaatgcagcacaaatataccggaaagtaaccagtggcataaaaccagccagcttcaataaagtcacagaccctgaagtgaaagaaataattgaaggatgtattagacaaaacaaatctgaaaggttatctatcaaggacttactaaaccatgcattctttgctgaggatactggactgagggtggagttagcagaggaagatgattgctcaaattcatccttggctctaagactctgggttgaagatcctaagaaattaaaaggcaaacataaagacaatgaagctattgaattcagtttcaacttagaagcagatacacctgaggaagtagcgtatgaaatggtcaagtctggattcttccatgaaagtgattccaaagctgttgctaagtccattagggaccgagtgacattgattaaaaagataagggaaaaaaagcctgctggatgcttggaggaacgcagggattcccagtgcaagtatgtgaggaatgtacttcctcaacagcagactgcaactttacaacctactcctggtccacacactgcagctgagtatgaagaaacagaagttgatcaacatgttcgacagcagtttctacagggcaaaccacagcagcagtcctcctctgttaggggtgacacttcatctgagccaacagctggaccagttctacattcagatacttcaagtcatcccactgtagcctattcttcaaaccagacaactagctctcaggtattttctagtatcctacaagcttacataagtgttccagaacaaatacattcttcttaccaactactaggatatagcaaatttcaggggatttatctgttttcttttatttaccacttgcaggagcagccaaagctgactcagtccccagttttgcctgtggttcaaggtcagtcctctgttatgcccatatatgctgctggagttggagttgtttcacagtcccaaatctctcccttaactatccagaaggtctcacagataaagcctgtatcccaaccaattggagctgaacaacaagcaactcttcaaaatccagattttgttcgaagcttgaatcaagatgtgacatctgtgaaagaaaacaccaataaccctgataccccaagtggaaatggcaaacaggatcggaacaaacaacgaagagcctcctgtccccgaccagagaaggggactaaattccagcttactgtccttcaggtctcagtctctggagacaacatggtggagtgtcagctggaaacacataacaacaagatggtgacattcaagtttgatgttgatggtgacgcacctgaggatatcgctgactatatggttgaagataactttgtgctggaaaatgagaaagaaaaatttgtcgaggaattgagggctatcgtaggtcaagcccaggagatccttcatgtccactcagctgtagaaaaatctattggtgttgactctgttgccttggaatctaacagtaaccaaacaggatcatctgaacaagtactgataaattctgcatccactcaaactagcaatgaatctgctcctcagtcatccccagttggtcgctggcggttttgtatcaaccaaacaataaaaaaccgtgaggcacagtctcctccttcccttcagccttccatggccatggtgcctgggttacatccatttcctagttcaagaaacacaagtaatcaggcaatatcacagaacacagtgttcactatagagaataatccaggccatcgtgaacttttcacctccaaattagaccacaaggatgtggttgatggtaagattggtgaacatgctagtatagaaactgagcagtcaagtatttcctatcaagtggaagatgacagacagatcatgacaccagctactgataattccaattattctgctgctttggtgtgtccagttccaggtgaatgtgaggcactcaccagccaagcaggcatgttcatgcctacatatccaaatcagcaagctgctgttctggctgatgtgcatatagcctatcccggtgaatcagttccaattggtggtaatgctgctcttacatcagtacttgtatcttctgatcaaaagcctcaatccttgtcagtacagcagccaactatagatgcagagtttatttccaaagaaggagaaaccacagtaaacaccgaaacaagttctcctaaggcagtcattgccactcagactcctggctttgaaccagctgtgattctacctgctactatcctggaatcagatggggaacgacctccaaaaatggagtttgcagacaaccgaattaaaacactggatgaaaaattaagaaacctgctctatcaggagcacagcatttctagcatctgtcctgagagtcagaaggatactcaaagcatagactctccattttcttcctctgctgaagatatactatcctattcaatgccagaagtcatagccatcagtcactgtgggattcaagatagccctgcacaatccccaaatttccaacaaacaggctctaagattctgtccaatgtggctgcaagtcagcctgctcatatatcagtgttcaaaaaagacctgaatgtgataacttctgtacccagcgagttatgtttacatgagatgtccccagatgcttcacttccaggcgatccagaggcctatcctgctgctgtgtcaagcgatggaaccattcatctgcagacaggagtggaaacagaagataaaagatcagcaattgcttctgatcccattcctctgacacgggagttctcatctgatactagggctttgagtagatgtaaagcgatgagtggatcatttcagcggggtcggttccaggtgattactgttcctcagcagcagccagtaaaaatgatgtcttttgggaaagatcacagaccgccattcaacaaaacaacagtccagtctagtgagcaagcactaacctttgctgaagctgcagtgtcgcagttgatcgaagtggagcctgccatgcccactcataaagcttcagtttcttcacgcaagttgcgaactctttatgaaacctttaaagaagataaaggagatcctgaacaaggtgacatcgtatcttacagcacagcttgtgagaccagtgtctcttcagtcgctacagaaaagaatgtaacttcaaccacagaagttagtgtgcagtctgggtctgaaccgttagataaagaaaaaaatgagtcaactcctgggaaacagacatgtacaaatgaattttcagccactcttgctggtaatagaaagtccgtgacaaaaactcgtccagagggtgatcagtatttaccactccgtgaagagcaagcctatgctcaaacacagaattcactcttctattctccatcttccccaatgagcagtgacaatgaatcagaaattgaggacgaggacttgaaagtggagcttcaaagattacgagaaaaacacattcaagaggtggtcagtcttcaaacacaacagaataaagagctacaagagctctatgaacgccttcgagcaactaaagacaacaaagcgcaatcttcagaggttcctttgtcacctgcatcgccacgcaggccaagatctttcaaaagcaaacttcgaagccgcccccagtccatgacacattcagacaatctcgttgtaaaagatgcactgggtgtggagagtaataccgtgtcatgccagcaatctccagccagtaagaaggggatgttcacagatgatttacacaagctggtggatgactggacaagagaaacagtagggcattttcctagtaagccaagtttaaaccaactcaaacagagccaacaaaaatccgaagcagaaaactggaacaagtcatgtgaaagtactccatctactatgggatacacgtcaaactggatttcttctctctcccaaattcgtggagctgccccaacttccttgccacaaggactcccactcccttcatttcatgggccattagcatcatatggaatgcctcacgtttgtcagtataatgctgtgggtgccgcaggttatccagtacagtgggtaggaatttctggaccagcacaacagtctgtagtgcttcctacccaatctgggggactcttccagcccgggatgaatttgcagtcatttccagctccaccagtgcagaatccagcttcaatccctcctggtcctaaatga

SEQ ID NO: 84 - DNA, 3924 bp, Mus musculus
cagaaaggtgcgtggggaagagaagaccaagggactctgctagcgactctccagaggggctccctgtgtctctaaaagcgagcaatccaggggggcatggtgctacggtgagccaggtcatgacgtcactgctgggcttggctgtgcggttactgctcttccagcccgcgctgatggtgttctgggcctctcaggtgaggcagaactgccgcaatggcagctacgagatcagcgtcctgatgatggacaactcagcctacaaagaacctatgcaaaacctgagggaggctgtggaggaaggactggacatagtgcgaaagcgcctgcgtgaagccgacctaaatgtgactgtgaacgcgactttcatctactccgacggtctgattcataagtcaggtgactgccggagcagcacctgtgaaggccttgacctactcagggagattacaagagatcataagatgggctgcgccctcatggggccctcgtgcacgtattccaccttccagatgtacctcgacacagagttgaactatcccatgatttccgctggaagttatggattgtcctgtgactataaggaaaccctaaccaggatcctgcctccagccaggaagctgatgtacttcttggtcgatttctggaaagtcaacaatgcatctttcaaacccttttcctggaactcttcgtatgtttacaagaatggatcggaacctgaagattgtttctggtacctcaatgctctggaggctggggtgtcctatttttctgaggtgctcaacttcaaggatgtactgagacgcagcgaacagttccaggaaatcttaacaggccataacagaaagagcaatgtgattgttatgtgtggcacgccagaaagcttctatgatgtgaaaggtgacctccaagtggctgaagatactgttgtcatcctggtagatctgttcagctgtaggcagttaggaaagagggcaagcaatgttctcagcgtttccctcccaccctccagttggtggtttgccctggggagggagttgtcagtgtggccagctcgaagtgacttttctctcgcttacttggagggaaccttgctatttggacacatgctgcagacgtttcttgaaaatggagaaaatgtcacgggtcccaagtttgctcgtgcattcaggaatctcacttttcaaggctttgcaggacctgtgactctggatgacagtggggacattgacaacattatgtcccttctgtatgtgtctctggataccaggaaatacaaggttcttatgaagtacgacacccacaaaaacaaaactattccggtggctgagaaccccaacttcatctggaagaaccacaagctccccaatgacgttcctgggctgggccctcaaatcctgatgattgctgtcttcacgctcacggggatcctggtagttctgctgctgattgccctccttgtgctgagaaaatacagaagagatcatgcacttcgacagaagaaatggtcccacattccttctgaaaacatctttcctctggagaccaacgagaccaaccacatcagcctgaagattgacgatgacaggagacgagacacaatccagagagtgcgacagtgcaaatacgacaagaagaaagtgattctgaaagacctcaagcacagtgacgggaacttcagtgagaagcagaagatagacctgaacaagttgctgcaatctgactactacaacttgaccaagttctacggcaccgtgaagctggacaccaggatctttggggtggttgagtactgcgagaggggatccctccgggaagtgttaaacgacacaatttcctaccctgacggcacgttcatggattgggagtttaagatctctgtcttaaatgacatcgctaaggggatgtcctacctgcactccagtaagattgaagtccacgggcgtctcaaatccaccaactgcgtggtggacagccgcatggtggtgaagatcaccgactttgggtgcaattccatcctgcctccaaagaaagacctgtggacggccccggagcacctgcgccaggccaccatctctcagaaaggagacgtgtacagcttcgccatcattgcccaggagatcatcctccgtaaggagactttctacacgctgagctgtcgggatcacaatgagaagattttcagagtggaaaattcatatgggaaacctttccgcccagacctcttcctggaaactgcagatgagaaggagctggaggtctatctacttgtcaaaagctgttgggaggaggatccagaaaagaggccagatttcaagaaaatcgagagcacactggccaagatatttggccttttccatgaccagaaaaacgagtcttacatggacaccttgatccgacgtctccagctgtactctcgaaacctggaacatctggtggaggaaaggactcagctgtacaaggcggagagggacagggctgaccaccttaacttcatgctcctcccacggctggtggtaaagtcactgaaggagaaaggcatcgtggagccagagctgtacgaagaagtcacaatctacttcagtgacattgtgggcttcaccaccatctgcaagtatagcacacccatggaggtggtggacatgctcaacgacatctacaagagctttgaccagattgtggaccaccatgacgtctacaaggtagaaaccatcggtgacgcctacgtggtggccagcggtctgcctatgagaaacggcaaccgacacgcggtagacatttccaagatggccttggacatcctcagcttcatagggacctttgagttggagcatctccctggcctccccgtgtggatccgcattggagttcattctggcccctgcgctgctggtgttgtggggatcaagatgcctcgctattgcctgtttggagacactgtcaacactgcctccaggatggaatccaccggcctccccttgaggattcacatgagcagctccaccatagccatcctgaagagaacggattgtcagttcctgtatgaagtgaggggagaaacatacttaaagggaagagggacagaaaccacatactggctgactgggatgaaggaccaagaatacaacctgccatccccaccgacagtggagaaccaacagcgcctgcagactgagttctcagacatgatcgttagcgccttacagaaaagacaggcctcgggcaagaagagccggaggcccactcgggtggccagctataagaaaggctttctggaatacatgcagctgaacaattcagaccacgatagcacctatttttagaccaagtgaggtctgagaactgacagtagcaacctcctatatcatgaatctgtattttccagagacctcaacaacacaggcaagcgcttagcctcagtgccctgcctggaacgtagaaccaacccctcaagtcatgtgggtgttctgattttgggttggtggttggttggttggttggttggttttggttttgttgagacagagtttcgtgtatcccaagctggcctcaaacccactgtgtagcagcagatgaccttggacttctaagatcatccgtgtgtgttcctgacagtgtgatgagtgtataggtcagagccctgtcccacagttctccatggagcatcaacctgaattgaggagcgaggagggggaatgtcctgtgctgtacagaacttggggttttgttctaatttcatctctggtttggttttgttttctggctccttccctctctatgtgtgagagaagtttttaaattgtctgaattgtatgctaagtagcttatctccaagaaagtgtgtttaactagtgatttttgcagaaaccatgctggatattaggtaaaaaataaaagtgtttagagtctgaaaaaaaaaaaaaaaaa

SEQ ID NO: 85 - DNA, 3294 bp, Mus musculus
  misc_feature (1573)..(1575): n is a, c, g, or t
tcaggtctgcagcagggctgtcactttgaaggccagaactggacagcaccacactggaagacctgcctgccctgccagggcccgtggagactcactgtcagtcatctgaagactgtctcttccatatcagtcctctctgtggtattttggagtgtcctactttgggctgactccctttccctgttagcatgggcaagagagaccttcacccttggggtgctgggtccctgggactgtgaccccatctttgcccaggccctccccagcatagctacccagctggctgtagatcaagttaatcaggatgcctcactgctgccaggctcacagttggatttcaaggtcctccccacaggctgtgacactcctcatgccctggccacattcgtggcccacaagaacatagtggctgcttttgtaggccctgttaatcctgggttctgctcagcagcagccctgctggcccaaggctggggcaagtccctcttctcctgggcctgtgaagctccagagggaggaggtgacttagtgcccactttaccttctgcggccgatgtgctactgtctgtcatgagacactttggctgggctcgctgggccattgtgtcctctcaccaggacatctgggtaaccacagcccagcagctggccactgctttcaggactcatgggctgcccatcggactggtgacctctttgggacctggagagaagggggccacagaggtttgcaagcagctccacagtgttcatggtctgaaaattgtggttctgtgcatgcactcggcgctgcttggaggcctggagcagaccaccctgctgcactgtgcctgggaggagggcctcacagacggaaggctggtcttcctgccctacgacacgctgctctttgccctgccctatggaaaccgctcctacctggtcctggatgaccatgggccccttcaggaagcctatgacgcagtactcactgtcagtctggagtccagtcctgagagccacgccttcactgctaccgagatgagtggaggggcaactgccaacttggagccagagcaggtgtccccactctttggaactatctatgatgccgtcatcctgttggcccatgccctgaaccgatctgagacccatggagcggggctctcaggggctcacttaggggaccacgtaagagctcttgatgtggctggttttagccagagaatccgaacagatgggaaaggcagaaggctagcccaatatgtcatcctggacacagatggtgaaggaagccagttggttcctacccacattctggacacaagcacatggcaggtgcagcctctgggaaagcctatacactttcctggggggagccctccagcccatgacgccagctgctggttcgaccccaacacactatgcatcagaggtgtgcagcccctgggcagcctcctgactctgacgatagcctgtgtcctggcactggttggtggattccttgcttacttcatcaggttaggcctccagcagctgcggctgttgcggggcccccatcggatcctgctgactctccaggagctcacttccnnncagcggacccccagccggaggaggccacatgtggacagcggcagtgagtcaagaagtgtggtggatggtggaagtccacggtcggtgacccaggggtcagcaaggagcctaccagccttcctggagcacaccaacgtggccctgtaccagggagagtgggtatggctgaagaagtttgaagcaggcgtggctcctgatcttcggccaagtagccttagcttcctgagaaagttgcgggagatgcggcatgagaatgttactgccttcctgggcctctttgtgggccctggggtcagtgcaatggtgctggagcactgtgcccgtggcagcctggaggacctgctgcagaatgagaacctgaggctagactggaccttcaaggcctccttactgttggatctgatccgaggtttgcggtatctgcaccatcggcgcttcccccacgggcgcctcaagtccaggaactgtgtggtggacactcgctttgtgctcaagatcactgatcatggctatgcagagttcctggagtctcactgttcttccaggccccagccagccccagaagagcttctgtggacggctcctgagctgctgcgggggcctgggaaggccaccttcaaaggtgatgttttcagcttggccatcatcctgcaggaggtactgacccgagacccaccctactgctcctggggactctcagcagaagagatcatccggaaggtggcatctccccctcctctgtgccggccactggtgtcccctgaccagggtcccctcgagtgtatccagttgatgcagctatgctgggaggaagctccagatgacaggccaagcttggaccagatctacacacagttcaaaagcatcaaccaaggcaagaagacaagtgttgtagactccatgctgcggatgctggagaagtattccgaaagcctggaagatctggtccaggagcggactgaggagctggaactggagaggcggaagacagagaggctgctctcgcagatgctccctccgtctgtcgcccatgctctaaagatggggacaacagtggagcccgagtacttcgaccaggtcaccatctatttcagtgacatcgtgggcttcaccaccatctcagccttgagtgagcccattgaggtggtgggcttcctcaatgatctctacacgctgtttgatgctgttctcgacagccatgatgtgtataaggtggagaccataggggatgcctacatggtggcttctggtctccctcggcgcaatggaaatcggcacgctgctgagatcgccaacctggccctggacatccttagctatgcaggcaactttcggatgaggcatgcacccgatgtacccatccgtgtcagggcaggtctgcattcaggaccctgtgtggcaggtgttgtgggtctcaccatgcctcggtactgcctctttggggacaccgtcaacactgcctctaggatggagtccactgggctgccttacaggatccatgtcagtcaaagcactgtccaggccctgctcagccttgatgaaggctacaaaattgatgtcagaggtcagactgaactgaaggggaagggcttggaggagacctactggctgacagggaaggtaggattctgcagacccctgcctacacctctgtctatcaagcctggagacccatggcaggaccgcataaaccaagaaatccggactggctttgccaaa

SEQ ID NO: 86 - DNA, 3891 bp, Mus musculus
atggcttctaggacacgctctgagtctccactagaacctaggctctatgctggggcaggaagccgtgcagatcatccatctctggttttgatgctgtctgtcgttatgctagtgacttgtctcgaagctgctaagctcaccgtggggttccatgccccctggaacatctctcatccatttagtgttcaaaggttgggggcaggactccagactgttgtggacaagctcaactcagagccagtgggtcttgggaacgtgagctgggagttcacttacaccaattcaacatgcagtgccaaggagtcccttgcggttttcatcgaccaggtccagaaagaacacatttctgctctgtttggaccagcatgcccagaagcagcagaggttattggtttattggcctctgagtggaacatccctttgtttgacttcgttggacaaatggcagccctgaaagaccacttctggtgtgacacctgcgtgacacttgtgccacccaagcaggaaatcagtgcggtgcttcgggaaagcctgcggtacctgggctgggaacatatcggggtgtttggaggttcctctgcagattcctcctgggaacaagtggatgagatgtggggggctgttgaggatggactccagttccatttcaacatcactgccagcatgaggtacaacagcagcagctcagaccttctgcaggaaggcctcaggaacatgtcgtatgtcgccagggtcatcatcctaatctgcagctcggaggatgcaaggcgcattctgcaggctgcagtggacctgggactcgacactggagaattcgttttcatcctcttgcagcagctggaggtaggtttttggaaggaagtactgacaaaggacaaggtgatacgctttcccaaagtctatgagtcggtgtttctcatcgcacccagcgcctatggaggaggcattggagatgacggtttccggaagcaagtctcccaagaactgaggaggccaccctttcaaagctccatcacctcagaggaccaggtgagcccgtactctgcctacctgcacgatgctctcttactctacgctcagactgtggaggaaatgaggaaggctgagaaagacttccgggatgggcggcagctgattagcaccctgagagctggtcaggtcacactgcagggaatcaccggtcctgtgcttttggactcccaggggaaaaggcacgtggattactccgtctatgctctgcaggaatctggaaacaggtccctcttccttccctttcttcattatgacagttttcagaaagtaatcagaccctggaggaatgactcgaacacctcatggccccatggctcccttcctgagtataaacctggctgtggatttcataacgacctttgcaaaacgaagccacccactgtagcaggcagtatgacagtgactgtgactgctgtgatccccacggtgacgttcctggttcttgcctcggcagctgccatcacaggtctgatgttatggaggttgagagggaaagtgcagagccatcctggagacacctggtggcagatccgttatgacagcatcactcttctgcctcagcacaaactgtcccaccgaggcacacctgtgtcaagacgtaatgttagcgatacatctactgtgaaggcttctgcagattgtggctccttggtcaagaggcaccaggatgaagagctgttctttgcccccgtggggctttaccagggaaatcaggtggccctctgctatattggtgacgaagcagaagcttgggttaagaagccaactgtgcggcgggaagtctgcctgatgtgcgaactaaagcatgaaaacatcgtccccttctttggtgtttgcacagagccacctaacatctgcatcgttacacagtactgcaaaaaaggaagtctccaggatgttatgaggaactccgatcatgagatagattggatattcaagctctcctttgcgtatgacatagtcaatggcttgctgttcctgcatgggagcccactgaggtctcacggcaacctgaaaccttccaactgcctggtagatagtcacatgcagctgaagctgtcaggatttgggttgtgggagttcaagcacggcagcacatggaggagctacaaccaggaggccacagaccattcagagctctactggacagccccagagctgctgcggcttcgggagagtccctgttctggcacccctcagggagacgtttacagctttgccattctcctgagggacttgatccaccagcaggcccacgggccctttgaggacctcgaggcagctccagaggaaatcatcagccgcatcaaagacccccgggcacccgttccgcttcggccgtccctgttggaggataaaggtgatggaaggattgtggccctagtgagggagtgctgggatgaatctccagagctaaggcccatcttcccttccatcaagaagacgttacgagaagccagtcccagaggccacgtgagcatcctggatagcatgatggggaagctggaaacgtacgccaatcacctggaggaagtggtagaggagcggacccgcgagttggtggcagagaaaagaaaggtggagaaactcctgtctaccatgttgccaagcttcgtgggagaacagctaatagccggaaagtctgtagaaccggaacactttgagtctgtcaccatcttcttctctgacatcgtggggttcacaaagctgtgttccctcagctcccccctgcaagtggtgaagctcctcaacgacctgtacagcttgtttgaccacacgatacagagccatgatgtatacaaggttgaaaccattggagatgcctacatggtggcaagtgggctccccatccgcaacggagctcagcatgccgacgagattgccaccatggccctgcacttactcagtgtcaccacccacttccagatcgggcacatgcctgaggagaggctcaagctccgcataggcctccacacaggtcctgtggtggccggtgtggtgggaatcaccatgcccaggtactgtctgtttggagacactgtgaacatggcatccaggatggaaagcagcagcttgcctctccggattcacgtttcccagagcaccgcaggagctcttctagcagcaggggggtaccatctgcaaaagagaggcaccatttcagtcaagggcaagggagaacagacgaccttctggctgaaaggcaaagatggcttccctgtcccactccctgagtttacggaggaagaagctaaagtttcagaaatattgtgaggttctctcaagatgtttgtagagccccactaatgtctgtgggtgtccttcgggggcagggggtgggggggacaacaatgacgatgaatgcatccaacattcctttgaacagttgtagctctgtgtcaatgaatcaatgacccgccactagatggtgctgtctgactggtgtctcattctgtcccaacctttgctcccagaccccccagctattgtgcagttggaagaggtggctgtagggaactcacttccaggcatggccagtcatagaggcttttagcctcacaactagtgtcattagtccatcatgccttactctttcttgcgacacttatttctttgccccagcctatatggttgctagcgaatgaatgcagagaatattcgtataccatgcagctctcaagactttttgttctgttgcaacaccaaagaatgaagaggcaagacccaatgagagcagttagattttctttgttgctggcatgctctgtggagatacttttgagtactctattgagaaacaaactaccttttgttttcttggggagctttcatgcgaatatttataaaaaaatgcttgat

SEQ ID NO: 87 - DNA, 4333 bp, Mus musculus
tctgggtgtagcacgctgccggttgacttcccaggactcttctgtgacctgtgagccgaggattactgggtaccccagattcccagaacccagtcctggattgcagatctgtaaggaccgtgaaagattgagcaaagaagtctttctggacttaagagttccggaacaggacgtccagcccatctccggatcccgactggatccacaccttcagcctcgtgccctgtcccgggttccccgcgcccggggccccgcgcttgagcgcccccgcatggcggggccatgtcctggggccggggttctagaacgggcgggcagctgctggcaggacccgctggcggaggcgctgagccggggccgctcgtctcctgcggtcacgggtcggggctgcgcgcggagccggcctctcagtgtggtctacgtgctgacccgggagccggggctcggggtggagcccgggtcgggaaccgaggcagagccgctgccgttgcgatgcctgcgcgaggcctgcgctcagctccagggcacacggccacccccgcagctacgcagcctaccctttgcgacgctggcgctaggcgacaccgctgcgctggactccttctacaacgcggatgtagtggtgctggaggtgagcagctccctggcacagccttccttgttctaccacctcggcgtgcgtgagagcttcagcatgaccaacaacgtgctcctctgttcccaggcagagctccctgatctgcaggcccttcgtgaggatgttttccagaagaactcggattgtgttggcagctacacactgattccttatgtggtgacagccactggccgggtcttatgtggcgatgcaggcctcctgaggggcatagccgatgggctagtacaggctggggcgggcactgaagccctcctcactcccctggtgggccggcttgtccgtctgttggaggctacacccacagactcttgcggctatttccgggagaccattcgtcaggatatccggcaggctcgggagcgattcagtgggcagcagctgaggcaggagctggctcgcctgcagcggaggctggacagcgtggagctgctgagccctgacattgtcatgaatctgctgctgtcgtaccgtgatgtccaggactactcggccatcattgagctggtggagacgctgcaggctttgcccacctgtgatgtggctgaacagcacaatgtctgctttcactacacatttgccctcaacaggaggaacaggcctggggaccgggagaaagccctggctgtcctgctgccattggtgaagtatgaaggtcccgtggctccggatctgtactgcatgtgtggtcgtatctacaaggacatgttcttcacttctggcttccaaaatgccggccacctggagcaggcctatcactggtaccgcaaggcgtttgatgtggagcccagcctgcactcaggcatcaatgcagctgttctcctcattgcagctgggcagcatttcgaagactctgaggagctccggctgattggcatgaagctggcctgcctgctagcccgcaaaggctgtgtggagaagatgcagtactactgggatgtgggattctacctgggagcccagattcttgccaacgaccccatccaggtggtgctggctgcagagcaactgtacaagcttaatgcccccatttggtacttggtctccgtgatggagaccttcctactgtaccagcatttcagacccacaccagagccctcaggaggacccccgctgcgagctcacttctggctccacttcctgctacaatcttgccagcctttcaagatggctcctcctcaggaggaccagtgcctggtactggtgctggagataaacaaggtcctgctgcctgccaggcttgagattcagggaacagaccccgtgagcacagtgaccctaagcttgctggacccagagactcaggaggatccttccagctggaccttcccagtcacctccatctgtgggatcagcacctccaagctggaccagcgctgctgcttcctgtacgcacttcctccggcccaggacgtccagctgtgctttcccagtgtggagcgctgccagcggttctgtggcctaattcaggtcttggtgatgaatccggattcctccgcgcccactgaggaggcagaaggcgcaagggaggtgctggagtttgattatgaatactcggagactggtgagcggctggtgttgggcagaggcacgtatggggtggtgtatgctggccgagacaggcacacgagggtacgaatcgccatcaaggagatcccagagagagatagcagattctctcagcctctgcatgaagagatcgctcttcacaaacgacttcgtcataagaatattgtgcgttatctgggctcagccagccagggcggctacctcaagatcttcatggaggaagtgcctggaggcagcctgtcctccttgcttaggtcagtgtggggacccctaaaggacaatgagagcactattagcttctatacacgtcagatcctacaaggactcagctacctccatgagaaccgtatcgttcacagagacatcaagggagacaatgttctgatcaacaccttcagtgggctgctcaagatttctgactttggcacctctaagcggctggcaggcatcacaccgtgcacggagactttcacagggactctgcagtatatggccccggaaatcatcgaccagggcccgcgaggatatgggaaggcagctgacatctggtctctgggctgcactgtaatcgagatggcaacaggtcgaccgcccttccatgaactagggagccctcaggctgcgatgtttcaggtgggcatgtacaaggtacatccacccgtgcccggttccctgtcagctgaggcccaagccttcctcctccgaacttttgagccagatccccgcctccgagccagtgcccaagagctgctgggagaccccttccttcagccaggaaagaggagccgcagcccgggctctcctcggcatactccccggccctcaggcgccccttccggtccttccagtccttcagctgactcagccacacagtctcagacattcccaaggccccaggcaccctctcagcacccacccagccccccaaagcgctgccttagttatggggacaccagtcagctccgtgtgcccgaggagcccgctgccgaggaacccgcgtccccagaagagagttcaggcctgagtctgctgcaccaggagagcaagcgccgggccatgctggctgcggtgctggaacaggaggtgcccacactagcagagaatctcctggaacaggaacaggactctcgactcagcaagattcatgtggaacttctgcttcggtgccttggggcacaaatccacactcctaaccgccggcagctggcccaggagctgcggaccctgcaagctcagctgcgggcccagagcctgggccctgcgcttttgaaggggccgctcttcgcctttccagacgcggtgaagcagatcctccgcagacgccagatccgcccacactggatgttcgtgttggactcgctgctcagccgtgcagtccgggcggcgatggcggtgctggacgcggagtcggagaagaaagcggtcttaccgaggtcagaagagtcgagtaaagaggagtcccagcagaaacctcaggagagccaggcgctgcagagccagctcccaccagagcagggacccccatcgttgatggtggagttgggccttttgcgagccgagactgacaggcttcgggaccttctggctgagaaggaacgtgagtgccaggcgctggtgcaacaggccctgcatcgggtgcatgcagagaccaggaagtatgccccagcttcagagaccccagccactctcccaaaggaccagaacctggtgcggtggctacaggaactgagtgtagatccagccactatccaaacgctcctgagtcatagcttcacccttcaaaccctgctcacctgtgccactcaagatgatctagtgtacaccagaatcaggggagggatggtatgccggatttggagagccatcttggcacagcgagcaggagccacatcggtcaccccagtaccccgggacgctgagtgatgacatcaaaggacacagatacggatggatgaacagagaagacacaaacagctttggacacacctgtcctagaacccaggagcaactacagggaccaggcccaaccccaatgggtggaactaactagggaggcacccaaaggacactacatacaatcatagactattaaacagaacacttgctacc

SEQ ID NO: 88 - DNA, 4167 bp, Mus musculus
  misc_feature (445)..(474): n is a, c, g, or t
  misc_feature (784)..(822): n is a, c, g, or t
  misc_feature (1996)..(2007): n is a, c, g, or t
atgaacaaaaacagactgattcatgatttccttggcgtggtttcaaggggtgacgtggaatgcatttgtggccttattcctgaagtccactcagtccttggaaatcttgactttcagcacccacagacggggaacacgcctctcattactgctgcggaagaaaatctagcagaggcatgtgaagagttcctggatataaacttccccaactcgcatggtctgacccctctgatgctggctgtgagagatgtggacctatttgagagtctggatctattaacagcttacagacctgatgaagttctagccgagctcctccggcaccatgcggatcctaagctttgtgatttcagtggcaagtcagcaatacattatgtgtcacaaattgagagttggaggaagcagcagttactggacatcctgatggattctatgcccagaccannnnnnnnnnnnnnnnnnnnnnnnnnnnnncagcaaatgagttttccccatctctctcctttcagtcaggtgacttcagagcatcaggaacgggaacaagtgcatcctgtctctccaccagatgacgcggagatggtgggcctcacggggaggatgctaaccacacagccttcacttctgaagacagacggaagttctgaggagctctgtggtgtggacgtggctctctcaccacccagaccttgcttagactcaagccttgctgcatctgcagctggggaggtggctccttgtgttctgaaagaacagcaaaggcaatctgatggtgagtcaagctctnnnnnnnnnnnnnnnnnnnnnnnnnnnnnnnnnnnnnnnctgccaccactatcatgcttgcccatgagatcttgtatcttcaatatggaaaaaagccccaagtccccaaggcacagggaaagaaaggtccccagcctcagcctgtctgtgcctaagctcctggaacctcttagccgacctcttagccaatctgcagagtttagttcatcaaagaaccatcaagaagtcacgcaggaaggaccagtggaacacaccctcaggggttctaactgtaccctctggtccagaaacatgtgttctttccggaagagcggaaaacagggagtagcggagagttggccatcccaggaaatggaagggtgggacaaaactaaaacctctggcttcaaagaagggccatctttgttctcttgtgagagtgtcaaagaagacactactcctacagagagggaaagggatagtgggtaccatgttagtgagatgcaaagagggggagaggactcccaatatctttcatcaagaaaaaaagagagttggacagccagagtggttgagcgagattcaggggttgagcaccccattctctgcaagctcctggaagtctcaaattcagaaatgaccccagcagaggagaaagagatcggaaatgagaacgttcctgatgccaaaagcaattctgtacacaaatctggagcaatggagccacatgcagcgtcagaagaggttagtgttcctaagaatggtcccagtgtgaactctgacggccctgctgaagagctggaaggtcatagagacatagaacagaacagaaaaataccaatggaggaagaaacaaatcccgaaatgaatggggtggtgccgcttactcacatcgcattccctggagaagggacatccaagggacccgctagagccgaaccacacctccaaaggagaaagcgcccggcgcagaacagcaacagcttcaacctgcttgctcaccgagaacacgacaaactccagacaaatactcatagaaccaagttggattcaaggaccaaggccaggaacagagcaccccctaatctcatggtttccatccaagcatccattaagcccaacatgcataaaaacagcataaaaactcaagttttccctgctttggaacttatagaccacagacctcatccctcctccaagtttcaaaggagagcacctctgacagaaaagaagnnnnnnnnnnnnaagaagtcaacgcatcagacccagaaacctaaaaagcaagcatttcctcgaatcggtaaacatgcaggcataaaaaagccaggcattcccctctccgctgaaacaacagatccgagactgcacttcctggatttgaagtacagtgacatgttcaaagaaatcaactcagcctccaacggaccaggcatctatgagatgtttggaacccctgtttattgtcacattcgcgaggcagaaaggcacgaccacagatgttaccgtgagatacgtacggctccatcaggccgatgtgtcgttaataaatgccagtcttccgaaagtgacaggtgcagcaacagcagggcaagacttcttcagaagagacaacacattaaacccccaaagccattgcatggtctcaggcaaaagcacagagggttcatttctaaagacaaaggttgcaaggatatggggggccatacagaggatagcgtttcagaacctgatgggcagatgaaatctccaggaaatgactttctatcttccaaagatgacgctcaactcatgcacttgatccccatccctgaactgtcccccgaacagaaagcacccgctccagtctcagatctatccattgttgaggaaatcttcacagaggagtgtgcagacgaagaaggcattctcaacgatgacagccttacccaaagccttggcgatctgaaagagcctgaagggttgcacccccaggcccctctcgttccttcagaaaacagctgggctgtgcttagcgagaagcgttcgggcaagcgtgtgtctccagaaaagcacaatgtagaacctcttgataaaataaatgctgagcagatgttcccgggttacctggagtttgatagcctttcagagaagtctaaaacactggtgagcttttccagttgctctttccaggagaacctggaaagagccccttcccctacagaacaacactgggcacgttctttggagcaggacagcttagaaaataactccaccacataccagacatttggaaagatttcccaggaaatcttagacccaggaaagaatgaagagttgacagacgagttgctgggttgtctagttgaagaactgttagcactcgatgagaaagataacaactcttgccaaataatgacaaatgaggcagacgccaaaaacctgaatcttgtcttcagcaggagaggcaataccatcgaagaactgggcagagagacaacagatgtcaaacttcagaggtgtattaatggattccggatatatgatgaggaaaactttcttacctcaaatgaaaagaagacactttctgacaagagcttaaaccacgaagaggctatcttctggaccaagggtgagatccttgggagaggagcctatggcacagtatactgtgggctcaccagcctagggcagctaatagctgtaaaacaggtggccttggatacttctgataaactggctaccgagaaggaataccggaaactgcaggaggaagtggatttgctgaaggcactgaagcatgtcaacatagtagcttatctagggacgtgcttggaggagaacactctgagcatcttcatggaatttgtccctggtggttccatctctagtataataaaccgctttgggccactgcctgagatggtgttctgtaaatacacaagacagatcctgcaaggtgttgcctatctccatgacaactgtgtggtacatcgagatatcaaagggaacaacgtcatgctcatgccaacgggaataataaagttgattgacttcggctgtgccaagcgtttggcctgggcaggcttaaatggtacccacagtgacatgctcaagtccatgcgtgggactccatactggatggccccggaggtcatcaatgagtctggctatggaaggaaatcagatatatggagcattggctgcaccgtgttcgagatggccacagggaagcctcctttggcttccatggataggatggcagccatgttctacattggagcccacagaggcctaatgcctcctctacctgcccgattctcagaacctgctgcggacttcgtgcgtttgtgcctgaccagggaccagcatgagagaccttctgctctccagctcttgaagcactccttcctgaagagaagccagtga

SEQ ID NO: 89 - DNA, 4003 bp, Mus musculus
ggcaaggccgaggccgggcgcgggccacgccgggctctgcgggctgtctacgtgcgcagcgaaagttcgcagggggcagccgccggcggcggccccgaggccggggcgctcaagtgcctgcttcgggcttgcgaagccgagggcgcccacctcacctccgtccccttcggggagctcgacttcggggagacggccgtgctcgatgccttctacgatgcagatgttgccattgtggacatgagtgatatctccagacagccttcccttttctaccatcttggagtccgagagagttttgacatggctaacaatgtaattctctactatgatactgatgctgacactgctctgtcattgaaggatatggtcactcaaaaaaacacagcatccagtggaaattattattttatcccctacactgtgacaccatgtgctgactatttttgctgtgagagtgatgcccaaaggagagcctcagagtacatgcagcctaactgggacaccatactgggcccgctgtgtatgcccctggtcgacaggttcactagcctccttaaggacatccgtgtgacttcatgtgcttattataaagaaacattgttaaatgacatccggaaagccagagagaaataccaaggtgatgaactggcgaaagagttgactcggatcaaattccgtatggataacattgaggttctgacatcggacatcatcattaacttacttctgtcctaccgtgatatccaggactacgatgcaatggtcaagctggtagagacactgaagatgctgccaacgtgtgatttggctgatcagcacaacattaaatttcactatgcatttgcactgaataggagaaacagcacaggtgaccgtgaaaaggctcttcaggttatgctccaagttctgcaaagctgtgaccacccagctcctgacatgttttgcctgtgtgggcggatatacaaggacatcttcctggattcaggttgtgaagaggatgcaagcagagacagtgccattgagtggtatcgcaaagggtttgaactccagtcatccctttattcaggaattaaccttgcagttttgctgatagtttctggacaacagtttgaaacttcgatggaactaaggaaaataggtgtccggctgaacagtttattgggaagaaaagggagcctggagaaaatgaacaattactgggatgtaggtcagttcttcaccgtcagcatgctggcaagtgatattgggaaagctgtccaggcagcagagaggttgttcaaactgaaacccccagtctggtacctgcggtcattagttcagaacttgctgttaattcaacgcttcaagaaacccattacagaacattcacccaggcaggaacggcttaacttctggttagatatcatttttgaagcaacgaatgaagttactaatggactcagatttccagttctggtaatagagccaaccaaagtctaccagccttcttatgtttctatcaacaatgaagctgaagaaagaactgtttctttatggcatgtctcacccacagaaatgaaacaaatccatgagtggaattttacagcctcttctattaaaggaataagcctatccaagtttgatgaacggtgctgttttctttatgtccatgataattctgatgactttcaaatctacttttccaccgaagaccagtgtaatagattttgttctttggtcaaagagatgctaaacaatggagtgggcagtacagtggagttggagggagaggctgatggagacaccttagagtatgagtatgaccatgatgcgaatggggagagagttgtcttggggaaaggctcctatgggattgtgtatgccggccgtgatctcagtaatcaagtacggatagccatcaaggaaatcccagagagagatatcaggtactctcagcctctgcatgaagaaatagctctgcacaagtatctcaaacatcgcaacatcgtccagtacctaggctctgtttcagagaatggctacattaagatatttatggagcaggtgcctggaggaagcctttctgctctcttacgatctaaatggggacctatgaaggaacccactatcaagttttataccaaacagatcctggaaggcctgaagtatctccatgaaaaccagatagtgcacagagacataaagggagataatgttctggtgaacacctatagtggagtggtaaaaatctctgattttggaacctctaaacgcctcgcaggaattaacccatgcaccgagacctttacaggaactctgcagtacatggcacctgagattattgatcaaggacctcggggatatggtgctccagctgatatctggtccttgggctgcaccatcattgagatggcaaccagcaggcctccattccatgagcttggtgagccccaagcagccatgtttaaggtagggatgtttaagatccaccctgaaattccagaggccctttcagctgaagccagagccttcatcttgtcttgttttgagcctgaccctcagaaacgtgtcactgctgctgaccttctccaagaagggttcttaaggcaggtgaacaaaggcaaaaagaaccgaattgctttcaagccttcagagggtgttcggagtggcactggtactctggctctgccttcatcaggagagcttgtgggcagcagcagcagcgagcatggctcaatctccccagactcggatgcccagcctgatgcattctttgagaaagtccaggtgcccaaacatcagctcagccaccttctcagtgtcccagatgaaagcccagccttagatgaccgaagcacagccttacccccagaggagagggaccctggtctctttctgctgcgcaaggacagtgagcgcagagccatcctttacagaatcctttgggaggaacagaaccaagtggcttccaacttgcaagagtgtgtggtccagagttcagaagagttgcttctctcagttagccacatcaaacagataattggaatcctgagggacttcatccgctccccagagcacagggtgatggcagccacaatatcaaaactaaaggtggacctggactttgacagctcatccatcaaccagattcacctgattctgtttgggttccaagatgctgtcaatagaattttgagaaaccacttaattaggccccactggatgtttgcaatggacaacatcattcgcagagctgtgcaggctgcagtcaccattctcattccagagctccaagcccactttgagcctgcttctgagactgaaggggtagacaaggacacagaagtagaaggggactatcccctagtagacctcctcagccaagaagtgcatgtgacacctagaggcaccagacctggctcagtggctatccaggagggccagccccaccagcaagacccaagtctccaactgagcaagctcaggcaagagaccaacagactttgggaacacctagttcaaaaagagagggagtaccagaatcttcttcgcctaattctagaccagaaaactcaagaattgtatcaccttcagttacagtacaaatccaatggtggtacagagaaccctccaccccctgatggactgggaaccgacagagagcttatagactggttgcaactacaaggagtggatgccaatacaatagaaaagattgttgaagaggactatacactttctgatattctcaatgatatcactaaggaagacctaaggtgcctccgactacggggtggtgtcctctgtaggctctggcatgcagtctcccagcacagaagacaaatgcaggagtcttggggagaatgggcaaaaagtcccctacacctgctcatgattaaagcttctgttggtgtactcacaaactccgagtttccacagaaagacccttgtccatttaattcaagcacgtgtgattgtagagcatccttgtttataaacaagattgtaagtaatgtcagccctg

SEQ ID NO: 90 - DNA, 2344 bp, Mus musculus
gggcagggctggggtataagcttgtttcgcggtgccgcggaggttaaggccggctcgtgggctgggccggggactgcgggacgcggagccgcgggaggcgaggtcggtcgcagccgcgcgtctccgcctcggggccgcgcttgacccgcgcgccccggcgttgtgcgccccaaggctgggccaagcggcgggttgggggcggcggctgggcgtggggaggcgcgcggcgaggtgacctgagagcccggagcgtgaggagcacggagccaggcgctgcagccgtcatgtccgaggactcgagcgccctgccctggtccatcaacagggacgactacgagctgcaggaggtgatagggagtggagcaactgccgtggtccaagcagcttactgtgcccccaaaaaggagagagtggcgatcaagcggataaacctggagaagtgtcagaccagcatggatgagctcctgaaagaaatccaggccatgagccaatgccatcatcctaacattgtgtcttactacacatcttttgtggtaaaggatgagctgtggctcgtcatgaagctgctaagtggaggttctgttctggatattattaaacacattgtggcaaagggggaacataagagtggagttctggacgagccaaccattgctacaatcctccgagaagtcttagaaggactggagtacctgcataagaatgggcagattcacagagatgtgaaagctggaaacattcttctaggagaagacggctctgtgcagattgcagatttcggcgtcagtgcttttttagccactggtggtgacattaccagaaataaagtgagaaaaacgtttgttggcaccccgtgctggatggcacccgaagttatggagcaggttcgaggttatgattttaaagctgatatttggagttttggaatcactgcgattgaactggccacaggggcagctccttatcataaatatccaccaatgaaggttttaatgctgacgctccagaatgatcctccttctttggaaactggtgttcaagataaagaaatgctgaagaaatatggaaaatcatttagaaaaatgatttcattgtgccttcaaaaggatccagaaaaaaggccaacagcagcagaactgttgaggcacaaatttttccagaaagcaaagaataaagaatttcttcaagaaaaaatactccagagagcacctaccatttctgaaagatctaaaaaggtccgcagagtccccggctccagtggccgtctccataagacagaggacggaggctgggagtggagtgacgatgagtttgatgaggagagcgaggaagggagagctgccatttctcagctgaggtctccccgagtaaaagactcattatccagttctgagctcttcgcggcagctgagcccatggggactttgcttcaagttccagaacagatttctgctcatctacctcagccagctggccagatgcccacacagccagctcaagtctctctcctgccccctgcagagccagcaaaaccagcacaggctcagtcttcaggagaacggtcccaggagaccaagatccctatcagtctagtgctaagattaaggaattccaaaaaagaactaaatgatattcgatttgaatttactcctgggagagatacagcagagggtgtttctcaggagctcatttctgctggcctggttgatggaagggatttagtaatagtggcagccaatctgcagaagattgtggaagaacctcagtcaaaccgatctgtcactttcaaactggcatctggtgttgaaggctcggatattcctgatgatggcaaactgataggatttgcccagctcagcatcagctaaaccacagacctggaagagtcagcctaggagatgccacacatgcacatgtctgttgcttctgttggcctgaacctacaactgccaaagaacccagcaacaaacctcccagcttggagctttagtttttttctttgtttttcttgctgccctcctccctgccccccttttcttacaaggaaagaaaagttggatcgtcagtggccagcctcccctcagagagttccgttggtagatacgctgctcatgtcccctctccctccatctgagaagcagaagcggccagtgtgcctcaaggcccaggatggaagactctcaactcattcttgccttactacagtgatggtcccagtggatagagcagctgcactgggcaacctcatcttgcctgctctcccgcacctgctgggacatgagcatcttgggatatctctttaacactcaagtagcaattaaagttgattgttcagctggagccc

SEQ ID NO: 91 - DNA, 4200 bp, Mus musculus
atggcgaacgactctcccgcgaagagcctggtggacattgacctgtcgtccctgcgggaccctgctgggatttttgagctggtggaagtggttggaaatggcacctatggacaagtctataagggtcgacatgttaaaacggtcactgccgccatcaaggttatggacgtcaccgaggatgaagaggaagaaatcacactggagataaatatgctgaagaagtattctcatcatcgaaatattgccacgtactatggtgctttcattaagaagagccctccaggacatgatgaccaactctggcttgttatggagttttgtggggctgggtccatcacagaccttgtgaagaacaccaaagggaacactctcaaagaagactggattgcttacatctccagggaaatcctcaggggattggcacatctccatattcaccacgttattcaccgagatatcaagggccaaaatgtgctgctgaccgagaatgctgaggtgaaacttgttgattttggtgtaagcgctcagctggacaggacggttggacggagaaatacgttcataggcacaccctactggatggctccagaggtcatcgcctgtgatgagaacccagacgccacttacgactacagaagtgacctctggtcctgtggcatcacagccatcgagatggctgaagggggcccccctctctgtgacatgcatccaatgagagcgctgtttctcatccccagaaaccctcctcccaggctgaagtcaaaaaaatggtcaaagaaatttttcagctttatagaaggctgtctggtgaagaattacatgcagcggccctctacagagcaacttttaaaacaccctttcataagggatcagcccaatgaaaggcaggttcgaatccagcttaaggatcacatagaccggaccagaaagaagagaggcgagaaagatgagacggagtacgagtacagcgggagcgaggaggaggaggaggaagtgcctgagcaggagggagagccaagttccatcgtcaatgtgcctggagagtcaactctgcgacgtgatttcctgagactgcagcaggagaacaaggagcggtctgaggctctgcggagacagcagcttctgcaggagcagcagctccgggagcaggaggagtataagaggcagctgctggctgagaggcagaagcggattgaacagcagaaagaacagaggaggcggctggaagagcaacaaagaagagaacgggaagccaggaggcagcaggagcgtgagcagcggcggcgtgaacaagaggagaagaggcgtctcgaggaactggaaaggcggcgtaaagaagaggaagagaggagacgggcagaagaggagaagaggagagtggagagggaacaggagtacatcaggcggcagctagaggaggagcagcggcacctggagatcctgcagcagcagctgctccaggagcaggccatgttactggagtgccgatggcgggagatggaggagcaccggcaggcagagaggctccagaggcagttgcaacaagaacaagcatatctcctgtctctacagcacgaccacaggaggccgcacgcacagcagcagccgccgcccccgcagcagcaggacaggagcaaaccgagctttcatgctccagagcccaagcctcactatgaccctgctgacagagctcgggaggtacagtggtcccacctggcatctctcaagaacaatgtctcccctgtctcgagatcccattccttcagtgacccttctcccaaattcgcacaccaccatctccgctctcaggacccatgtccaccttcccgcagtgaggggctcagtcagagctctgactctaagtcggaggtgcccgagcccacccaaaaggcttggtctagatcagacagtgacgaggtgcctccaagggttcccgtgagaacgacctctcgttcccctgtcctctcccgtcgggattccccactgcagggcggtggacagcagaatagccaagcaggacagagaaattccaccagcagtattgagccccggcttctttgggagagagtggaaaagctggtccccaggccaggcagtggcagctcttcagggtccagcaactcaggatcccagcctggctcccatcctgggtctcagagcggctccggtgaacgcttcagagtgagatcatcatccaagtctgaaggttctccatcgccacgccaggaaagtgcagccaaaaagcctgacgataagaaagaagtattccggtctctcaagcctgcgggagaagtggacttgactgcgttggccaaagagcttcgagcagtggaagatgttcggccacctcacaaagtaacagactactcatcctccagtgaggagtctgggaccacagatgaggaggaggaggacgtggaacaggagggggctgatgattctacctcgggaccagaagacaccagagcagcgtcatctccgaacctgagcaacggtgaaacagaatctgtgaaaacaatgatcgttcatgatgatgtagaaagtgagccagccatgaccccgtccaaggagggcaccctcatcgtccgccagagtacagttgaccaaaagcgtgccagccatcatgagagcaatggctttgcgggtcgcattcacctcttgccagatctcttacagcaaagccattcctcctccacttcctccacctcttcctccccatcctccagccagccgacacccaccatgtccccacagacaccccaggacaagctcactgctaatgagactcagtccgctagtagcacactccagaaacacaaatcttcctcctcctttacaccttttatagaccccaggttactacagatctctccatctagtgggacgacagtgacttccgtggtgggattttcctgtgatgggctgagaccagaagccataaggcaagatcctactcggaaaggctcagtggtcaatgtgaaccccacgaacactaggccacagagtgatacccccgagattcgtaaatacaagaagagatttaactcagagatcctgtgtgctgccttatggggagtgaacttgctggttggtacagagagcggtctgatgctcttggacagaagtggccaagggaaagtataccctctgatcagccgaagacggttccagcaaatggatgtgctcgaaggcctaaatgtcctggtgacaatatctggcaaaaaggataagttacgtgtctactatttatcctggctaagaaataagattcttcataatgatccagaggttgagaagaagcaggggtggaccactgtgggcgacttggaagggtgcgtgcactataaagtcgtaaaatatgaaagaatcaagtttctggtaattgctttgaagagttctgtggaagtctatgcatgggcaccgaagccatatcacaaatttatggcctttaagtcatttggagaactgctacataagccattactggtggatctcactgtggaggaaggccagaggttgaaagtgatctatggatcctgtgcgggattccatgctgttgatgtggattcaggctcagtctatgacatttatctaccaacacatattcagtgtagcatcaaaccccatgcaatcattatcctccccaacacggatgggatggagctgctggtgtgctacgaagacgagggggtttacgttaacacgtacggaaggatcaccaaggacgtggttctgcagtggggagagatgccgacatctgtagcatatatccggtcgaatcagacaatgggctggggagagaaggcaatagagatacgatctgtggaaactggtcacttggatggtgtatttatgcacaaaagggctcagagactaaagttcctgtgtggacgcaatgacaaggtgttcttttcctccgtccgctctggtggcagcagccaggtctatttcatgaccttaggcaggacttctcttctgagctggtagaggcagtgtgagctgggatcactgacctctggagtcggcaagaccctgagcgagaccttggaattcctttcaactggagctcagagctgttctggtgcagccaggacagctgtcttcaggccacctgcgcgtcgcatcgggtcgggtcgggccctctcccctccctcctacacttttttccagtttattcccattctctccttttcctttctc

SEQ ID NO: 92 - DNA, 7020 bp, Mus musculus
gataacagccaatgcagccgccatccacgcacaagcaaagaagcatgtcccatttaaatacacccacgcagccccagcgcccttagccgatcagggcgcgcagcccacacgcaccgcggctccgggcttggagatccgcgcaggtcgggctccgggatcccgcggatcgacgctctcggaagatcgggatcggactcttgctggggcccgggtgggcgggggaggctgggccccgggcctctctggcggacagccgcatgaggacgcgagcgaaatagaccggggtggaattgccaaggaagacgcttcggggtggttttggtccatttctcccgcgaagagtcgacatggcgagcgactccccagctcgcagcctggatgaaatcgatctctccgccctgagggaccctgcagggatctttgagttggtggaacttgtcggaaatggcacgtatggtcaagtttataagggtcgtcatgtcaaaacgggccagcttgctgccattaaggttatggatgtcacaggggatgaagaggaagaaatcaaacaagaaattaacatgttgaaaaaatattctcatcacaggaacattgctacatactacggtgcttttatcaaaaagaaccctcctggcatggatgaccaactctggttggttatggagttctgtggtgctggctctgtcactgacctgatcaagaacacgaaaggcaacacattgaaagaggagtggattgcatacatctgcagggagatcttacggggcctgagtcacctgcaccagcacaaagtgattcatcgagatatcaaagggcagaacgtcttgttgactgaaaatgcagaggttaagctagtggattttggagtgagtgcccagcttgaccgaactgtgggcaggaggaacacgttcatcgggactccctactggatggcaccagtcattgcctgtgatgagaacccggatgccacatatgatttcaagagtgacttgtggtctttgggaatcaccgccattgagatggcagaaggtgccccccccctctgtgacatgcatcccatgagagccctcttcctcatcccacggaaccctgcacctcggctcaagtctaagaagtggtcaaaaaaattccagtcatttatcgagagctgcttggtaaagaatcacagccagcggccagccacggagcagttgatgaagcacccattcatacgagaccaacctaatgagaggcaggtccgcatccagctgaaggaccacattgatcgaacaaagaagaagcgaggagaaaaagatgagactgagtatgaatacagcggaagtgaggaagaagaggaagagaatgactctggggaacccagctccattctgaacctaccaggggagtcaacactgcgaagggacttcctgagactgcagctggccaacaaggagcgctcagaggccctgcggcgccaacagctggagcagcagcagcgggagaatgaagaacacaagcggcagctactggctgagcgccagaagcgcatcgaagagcagaaggagcaaaggcggaggctggaggagcaacaaaggcgagaaaaagagcttcggaaacagcaggagcgggaacagcgccggcactacgaagaacagatgcgtcgggaggaggagaggaggcgtgccgaacatgagcaggaatacatcaggcggcagctagaagaagagcaaaggcagttagagatcttacagcagcagctactgcatgagcaagctctacttctggaatataagcgcaaacaattggaagaacagagacaagcagaaagactgcagaggcagctaaagcaagagcgggactatctggtttccctccagcatcagcggcaggagcagaggcccctggagaagaagccactgtaccattacaaggagggcatgagtcctagtgagaagccggcctgggccaaggaggtagaagaacgctcaagactcaaccgacagagttcacctgccatgcctcacaaggttgccaacaggatctcggaccccaacctgcccccaagatcagagtccttcagcattagtggggttcagcctgcaaggacacccccaatgctcagacctgttgacccccagatcccgcagctggtagctgtcaaatcccagggacctgccttgacggcctcccagtcagtacatgagcaacccacaaagggcctgtctgggttccaggaggctctgaatgtgacctctcaccgggtcgagatgccacgccagaactcggatcccacctcagaaaaccctcctctccccacgagaattgagaagtttgacagaagctcttggttacgacaggaagaagacattccaccaaaggtgcctcaaagaacaacttctatatccccagcactagccagaaagaattcccctggcaatggcagtgctctgggccccagacttggatctcagcccatcagagcaagcaaccctgatctgcgcaggacagagccagtcctggagagttccctgcagcggacaagcagtggcagttcctccagctccagcactcccagctcccagcccagctcccaaggaggctctcaacctggctcccaagcaggatctagtgagcggtccagagtgcgggccaacagtaagtccgaaggatcacccgtgctcccccatgagccttccaaggtgaaaccagaagaatccagagacatcacacggcccagtcggccagctgatctgacggcattagccaaagaattacgagaactccgcattgaagaaacaaaccgccccctgaagaaagtgactgattactcttcctccagcgaggagtcggagagcagtgaggaagaagaggaagatggagagagtgagacacatgacgggacggtggctgtcagtgacatacccagactaatacccaccggagctccagggaacaatgagcagtacaacatggggatggtcgggacacatgggctggaaacttcgcatgcggacacctttggcggcagcatttcaagagaaggaaccttgatgatcagagagacggctgaagagaagaagcgatctggccacagtgacagtaatggattcgccggtcacatcaatctcccagaccttgtacagcagagccattcgccagctggaactcccactgaggggctgggccgcgtctccactcattcccaggagatggactctggggctgaatatggtatagggagcagcaccaaagcctctttcacccccttcgtggaccctcgagtgtaccagacatcgcccactgatgaagatgaagaggatgatgagtcttcagctgctgccctgtttactagcgaacttcttaggcaagaacaggccaaactcaatgaagcgaggaagatttcagtggtaaatgtgaacccaacaaacattcgccctcatagtgacacaccggaaatcagaaaatacaagaaacgcttcaattcagaaatactttgtgcagctctatggggtgtgaaccttctggtggggactgaaaatggcctgatgcttttggacagaagtggccaaggcaaagtctacaacctaatcaaccggaggcggtttcagcagatggatgtgctagaaggactaaatgttcttgtcacgatatcaggaaagaagaacaagctccgtgtgtactatctctcatggttaagaaacagaatcctgcacaatgacccagaagtggaaaagaagcagggctggatcactgtcggtgacttggaaggctgcatccattacaaagtcgttaaatatgaaagaatcaagttcctggtgattgccttaaagaatgcagtagagatatatgcgtgggcccctaaaccttaccataagttcatggcatttaagtcttttgcagatcttcagcataagcctctgctcgttgacctcacagtagaagaaggtcaaaggttaaaggtcatatttggctcacacactggtttccatgtaattgatgttgattctggaaactcctacgatatctatataccatcccatattcagggcaatatcactcctcatgctatcgtcatcttgcctaaaacagatggaatggagatgcttgtctgctatgaggatgaaggggtgtacgtgaacacctacggccggatcactaaggatgtggtgctccaatggggagaaatgcccacatctgtggcctacattcattccaatcagataatgggctggggcgagaaagctattgagatccggtcagtggaaacaggacatttggatggagtgtttatgcataaacgagctcaaaggttaaagtttctatgtgaaagaaatgataaggtattttttgcatccgtgcgatctggaggaagtagccaagtgtttttcatgaccctcaacagaaattccatgatgaactggtaacagaagagcacttggcacttatcttcatggcgttatttctaatgtaaaagaacataactcatgtggacgtatgccagtctagaggcagaatcagaaggcctggttgaacatactgctctctccgtttcctctccctccatctctcccaatatagtcctttttggtgttgcagcctggttgagaaggagagaaagaggtggcgggaatggctgggcaagcgattccgaggatgctgcattgtctgtggacagagatggaccttgtgcccttcggagctagggatagagacaaatattgtgtgctcttatgattaagctgtgttcatgctggcttttcagttctttttggtttggaactttttaactttttcccccctttaccaccttactttgtaagaatggggggaaatgcatactgggaacatagtctttttaaaattctgtctgcctgctagctttaagtatatggtatgttgtaaaagttccaactcccagtagtgagaaacatcgcaataaatggaccctatctccctgcactgaaggccataaccacatagtggggtaatttaagaattttcttgccttcactaacccaagaggctatttttgttttgtcttgttttgttttattttatcttttttttttaattgctactggctaatgaatttttgaaagagaagcaaaatagctggttttctcctctctggggaaatagattttaaatggctaaactattagccttaacctaataaaatcaactaccactcttgtgagtctgtcaggccatattttgatatggccctttctggaatggagggtgttgaatgggacagcgatgccattgagttgagtgggcttgtgactggggagggactctgggatgtgactgtccctcaattattatgcaacagatcagggcaaaagatgggatgacaggtgggtcacccagaaggagcttctgagaaatgagctaatatgtctatgtaaatacacacatgttctttcttcaaggcacaaagcctccttgataagaggtcccttcagttgggctttgttaggactgtgactggttgagatctttcccagagctgggggtacataacagccatgctctggaaaccctcccaagggtgccactttctcaacagaaaaactgtgatggagaagaattactaataaatgttcctgagctgcctgtgttcttactgggtcgagggactaactagacttgcaaggctgccgcacacagcaggcaccaaaagctcagattttagggaacctaaaggcaaggctttgacaaaattctaagactctaatcatgttatgttcctccaaactttccaacatactgttaacaacatctgtgcagagatgtgtatgtatttagttcaggttgacttgtgtccttatagaaacccttactcgaatgatttgaacctttatgtgactgactgggattttcctcaaagctataagcatggccgcctacggtatccaggtgttgcgaaatggtatctgtgctgtgcttcctgttttaacctacctcgttttgtttgtttttgtttctctgttcatcacagcagtgttatctccaggagacatatagagagctcacctggcaatctcagctgtattgaatattttcaaaacagtagttgaccaaattgttctttagaaattggagggggaaaaaaaatctccaatgacaaaaacctaatgcaggttgtttttaaagaatacaattactgtaaatggatcaaaaaagaaagacaaaaactgggattctcctgattttgcctaaagaaatgagcagctgatgtactattaatgagaacgaaacttatattaggaaaacggcacctttttaatctggtagttggccaaaggggatgagaaaggggactattctgagttctggactaggggaaaatctgtaatctccacaggtgattattgtttgcagttatctgaagcaggtaacacacagaaatatagtcagggtggtcttcaagtgatcaccaggatgcgcccgtcatggtccctctagctctcaaaggcaatgaaatccttccgttctcatttttactgctggggttatgctgccaaacaacattgtcctcatgaattccatgggacaaattcagcaatagatctgggttgaatttagcaactaccataattggatgctgatatggacaaaaataatgtagatttgggtcttgtctccaaatgcgattgccaccagctctttatattgctgctgtgatgttttgaacctgaggcttccttaaattatgttgcaaactgatctttgttttaatgttttgtttcgtttcattatttctaagcgatacatctgaaacacacagctttaaatgattttttattgtgggactttgggtacagttaagaaataaaagggaatcattgtgtttaaacataaggtagtttgtgaatgtattttttaaaatctagattaattggaacaagaaaatcataagaaaacatattaatgccgtcttgtttacagtatgtacagtgacataacattacatgagctttttctggtgccaacaaaataaaacacagacattaaacattgaaaaaaaaaaaaaaa

SEQ ID NO: 93 - DNA, 4620 bp, Mus musculus
atggcaggacctgggagttggagggacaaggaggtgacagatcttggccagttgccggatccaactggaatattctcactagataaagccattggtcttggtacttatggaagaatctttttgggaatccatgaaaagactggttcattggtggctgttaaagtaatgagtgccaggaagactcctttgcctgagataggaagacgggtgagagtgaataaataccaaaagtctgttggatggagatacagcgatgaagaagaggatcttaggacggaactcaacctgctgaggaagtactctttccacaaaaacattgtgaccttctatggagcatttttcaagctgaatcctcctggccatcagcaccaactttggatggtaatggagctatgtgcagcaggctcagtcactgatgtagtgaggatgacaagaaatcagagtttaaaagaagactggatcgcttatatctgtcgagaaatccttcagggcttagctcaccttcatgcacaccaagtaattcaccgggacatcaaaggacaaaatgtgctgctgactcatgatgctgaagtcaaaatagtggattttggagtgagtgcccaagtgagcagaacaaatggacggagaaatagcttcattggtacaccgtactggatggccccagaggtgattcattgtgatgaggacccaaggtgttcctatgattacagaagtgatgtgtggtctgtgggaatcactgctattgaaatggctgaaggggctcctcctctgtgtaagcttcagcctctggaagccctttgtgttattctacgggaagccgctcccaaagtcaaatccagtggatggtcccgtaagttccagaatttcatggaaaattgcatgataaaaaatttcctatttcgtcctacatctggaaacatgcttcttcacccatttgtccatgatataaaaaatgaacgacgtgttgtggagtccttgacaaaacatcttactgggatcattcaaaagagagagaaaaaaggaatacctgtggcctttgaaggagaagaagctgctaaggaacagtacatcacaaggagattcagagggccttcttgcactcctgagcttctcagagtgccaaccagcagcagatgcagaccactcagagtcctgcatggagagccccctcagccaaggtggctacctgatcaagaagacccacaggaccaagaacttcaacaactgcagaaggcagccggagtgttcatgcctctacattctcaggacaatacatccaagcttttcccaaagcaggttgaggtagcaccctatctccgtggggcagctcaggtggtcatgccagtactggtacaggttgaagcaccgccccaagtaagcaaagcagcccagatgctcaggtcactccccactcaggacaacaaagctacttctccagaggtccaggcccccgtagccgaaggacagcaggcccagcatgaggccttagagacagaacagcctaaagatttggaccaggtgccagaagaatttcaggggcaagacagggcacctgaacagccaaggcagggccaggctgctgagcagcagcagatacataatccggttcctgagcagccgccggaggaggatagggagcctgagcaagctgaggtgcaggaagaggctgtggagcctccccaagctgagatcgaggacaaggaacctgaggtagtgcaagtgcacgcccaggtgctcctgcctttactgtcccagaaccgtcacgtgctcttgcctcttcatttggatagacagctgctcattccggtaggggaacaaaatgaagaggtaccacgagcccaggcctgggatctagaggcctcaagggcagttggtgcagtgcaagcgctgatcgagggactatccagggacttgcttcgagcaccaaatgcatttgtcacaaaaccacttggtccgctgcagatcttcttggaaaatttgtctacagacgggttttacactgagccggaaccgacacagaagaaaaagtcgaaagttgctagtctaaggaaagcaatagcaaaacgactaagacccaagaggttcagagcaaaggcattatggcgacttgaagattttgaattctcagatgtagaaaccagcaggagacggcgccaccgtagatgggaggacatctttaatcagcatgaagagcaactgagacgagttgaaaatgacagagaagatgactcatcagacaatgatgaagtgtttcattcaattcaggctgaagtccaaatagaaccacacgctgcaaatcctgcaggaaatgaggtccatgagagatctgctcccatgccttgcaaccggaatcgcacacatcgtgtgaaattttctccaagtgttggtgaggaagagccttctttggaagaagcccagccgcagcagcagcagcagcagcccatgaacatccgaccgaggaattgcctaaatcctcagaattttcaagctcaatcagactcatcttctgaggaggacagtcctgtgactaggaggaagtcccagtcatcaccgccttattctactattgatcagaagctactgattgatatccacgttccagatggatttaaagtggggaaaatatcacctcctgtgtacttgacaaatgaatgggtaggctataatgcactctctgaaatcttctgggatgactggataatgcctacacgtcccgctcggccacctgaagaagatggtgattatgttgaactctatgatgctgatgccaatgctaatggtgatgaagaagttgcaaacggtgcttatgaagatcctcgtgatggtgccaatggccatgatgacatgaataaccagcttgatcaagcaaatggttatgaaggccatggtgctgctggctacaatggtggagacgttggtggtaatcatggtgctgctttcaatgggccaagagcaaattatcccagagcgggaatcttgaaaaacggtcataatgatggacgtgctctaaacaggggagcttttggagtctttggagacaatgcagccagagctttccatggagctgccggtgaagcaggtgcagcctttggaaaccatggagccaataggggcaatggaagaggtaacagaaacagggaggccaatggaaggaatgaagagaatggagcatttggacgggatcaacatgtatttccagagtttgaacatgaggaatcagatcgtggaactgagacctcagattcaattgccttggagatcacatcctttgatggtgagcaaaacagtggtagaccagtatcatcaacaacaatgggttttcctattggacgctcatctcctagaggttctgattttgggagtgacatcttatatgtaggactagttgaggtgcctgaaaaagcagctaagctaccatctgcagtcaatgttaacccgctctctgtctctccagcatataacagcccaatactacatgtgtatgaaaaggatttctcatctgaggtctactgtggttctttgtggggagtcaatttgttgctgggcacccaatctcatctgtatctgatggaccgaagtggaaaggcagaaattgttaaacttataaagcgaagaccattccggcagattcaagtcgtggagcagctcaatttgctgattaccatctctggcaaaaagaacagacttcgcgtgtatcatctgtcttggctgaggaacaaaattctgaataatgatccaaagagtaagaaaaggcagaaggcgatgaggaagaaagaggaagcttgcaaagctatcgataagttgattggctgtgaacacttcagtgtccttcaacatgaagaaacaacatacattgcggttgctgtgaagtcatcaattcacctctttgcatgggcaccaaaatcctttgatgaaaacactgccattaaagtatgcattgaccaatcagcagactccgaaggagactacatgtcctatgaagcctatatacgaatattggcaaaaatacaggcagctgatccagcgaaccggtttaagagaccagatgagctccttcatttgctgaagctcaaggtgtttccaactcgtgatcttaagccactgacagttgacctggctgttggttcagagaaaacactgaagattttcttcagctcagctaatggatatcatatcatcgatgcagaatctgaagttatgtctgaggtgaccttgccaaataattcactggaaatcattatcccacagaatgtcgtcattttacctgattgcttgggacttggtgtgatgctctccctcaatgctgaagctgcctccgaggaagcaaacgaacaactccttaagaagatcctggacgtgtggaaggacataccgtcttctgtggcttttgagtgtacaaagagaatcactggatgggaccaaaaggctattgaagtgcgctctcttcagtcaactattctcgagaatgagctgaagcgccgctcaatcaagaaactgagatttctctgtgcccgtggtgacaagatgttctttgcttctacactgagcaatgaccacagccgggtttaccttatgagccttggaaaacttgaagagctccatagaagctatgctgtttaa

SEQ ID NO: 94 - DNA, 4875 bp, Mus musculus
aagcacctgtatggattatttcactataaccccatgatgcttggcctggaatcactccccgatcccatggagacctgggagattatagagacgattggcaaaggcacttatggcaaggtctacaaggtagccaacaagagagatgggagcctggctgccgtgaaggttctggaccccgtcagtgatatggatgaggagattgaggctgaatacaacattctgcagtttctccccagccatcccaacgttgtaaagttttatgggatgttttacaaagccgatcgctgtgtgggaggacagctatggctggttctggagctgtgtaatgggggctctgtcactgagcttgtcaagggccttctgaggtgcggcaagaggctggacgaagctgtgatttcctacattctgtatggagccctcttgggccttcagcatttgcactgccaccgaatcatccaccgagatgtgaaggggaataacattcttctgacgacagaaggaggagttaagctcgttgactttggtgtctctgctcaacttacaagcacacggctgcggagaaacacatcagttgggaccccattctggatggctcctgaggtcattgcttgcgagcagcagtatgactcgtcctatgacgctcgttgtgacgtctggtccttgggcatcacagccattgagctgggagatggagaccctcccctctttgaaatgcatcctgtgaaaatgctctttaagataccaagaaaccctccacccactttgctgcaccctgacagctggtgtgaggaatttaaccacttcatttcacagtgtcttattaaagattttgaaaagcggccttcggtcacccatctcttggaccacccattcattaaaggaactcaaggcaaggttttgtgtctgcaaaaacagctggccaaggtgctccaggaccagaagcatcgaaaccctgttgctaaaaccaggcatgaaaggatgcatactggaagaccccatcgagtagaggatgccggcaagtgctgccttgaggatgacctggtcaatctcgaggacgaggtcctggacacgattatctactggctgcagaagcggtatgcagatgcactgatctacacctatgttggagacattctaattgccttaaaccccttccagaatctaagtatatactctccacagttttccaggctttatcatggggtgaaacgttcctcgaatcccccccacatatttgcatcagcagacaacgcttatcagtgtttggttactttcagcaaagaccagtgtattgtcatcagtggagaaagcggatcggggaagacggaaagcgcccatctgattgttcagcatcttactttcttaggaaaggctgacaatcagaccctacgccagaaaatcctccaagtgaactccctggtggaagccttcgggaacgcccgcacagccatcaatgataactccagccgcttcgggaagtatctagaaatgatgttcacaccaactggagctgtcatgggggcaagaatctccgagtatcttcttgagaaatccagagttatacagcaggcagcgggagagaaaaattttcatatattttactatatttatgctggtctttatcaccaaaagaaactcgctgagttcagacttcccgaggaaaagcctcctagatatatagctggggaaactgaaagagtcatgcaggacatcacctccaaagagtcttaccggacacagtttgaggccattcagcactgcttcaagattattggattcgctgacaaggaggtacactctgtgtacagaattctggcggggattttgaatattggcagcattgaattcgcagctatttcctctcaacaccaaactgataaaagtgaggtacctaatccagaagctctggaaaacgctgcctgcgtgctctgcattagctccgaagagcttcaggaggccctcacttcccactgtgtggtcacacgaggggagaccattgtcagagccaacacagtggacagggctgaagacgtcagggacgccatgtctaaggccctctatgggaggctgttcagctggattgtgaatcgaatcaacacactcctgcagccagataaaaacataatgaatgtgggcatcttggacatttttggctttgaggatttccagaggaattcctttgaacagctctgcataaatattgccaatgaacagatccagtactacttcaatcagcatgtgtttgctcttgagcagatggagtacaagaatgaaggtgtcgatgctgtcctcgtgcagtatgaagacaatcgcccactcctggacatgttcctccaaaaacccttgggccttctggcacttctggatgaagaaagtcgatttccccaagggacagaccagaccttggttgataaatttgaagacaacctacggtgtaagttcttctggaggcccaaaggtgtggaactctgttatggcattcaacactatgctggaccggtgttatacgatgcttctggggttcttgagaaaaacagagacaccctccctgctgacgtggtggtagtcctgaggacgtctgagaacaaactccttcagcaactgttctcaattcctttgaccaaaacaggtaatttggcacaaaccagagctaagatcacagcatcctcgagatctttgcctccacatttcagtgctgggagggccaaggtagacaccctggaggtgattcgacatccagaagaaaccaccaacatgaagagacaaaccatggcttcttacttccggtattctctgatggacctgctctccaaaatggtggtcggacagcctcactttattcgttgcattaagcctaatgatgaccgcaaggccctgcagttctcccaagacagagtcttggcccagcttcgctccacgggcatcctggagaccgtcagcatccgcaggcagggctactcccatcgcatcttctttgaagagtttgttaaaaggtattattacttggcattccgagcacatcaaacacctcctgctaacaaagagagctgtgttgctatcttggaaaagtccagattagatcactgggtcctggggaaaacaaaggttttcctcaaatattaccatgtcgagcaattaaatttgcttctgcgagaagtcatgggacgagtggtcatgctgcaggcatataccaagggctggctcggagcaaggagatacaagagagccaaagagaagagagagaagggcgccatcaccatccagtcagcctggagaggctatgatgctcggaggaaattgaagcaaagaagccggaggaggagtgagtccgaggctcacattcacacagctgcaaatccccaattgaggttctggaagaaacaggatcttgaccatgccaagagttcccggagtgcaaggaatcgtcaacagacggagagagtggagctcaggagtggagtccagtgctgctctgggggagagagggcttcagagttctccaaaccactcctgatcagaaatactgtccagattcaggaggagagtccaacagaggtcatgaagagacgtcaaggaactgccccgctgaagccgacacagatgggctccagatgccaagagattcctccagggctctttctgttctatccatattgtgtctttacttgtcatggcttaaatcttgagtcacaaccagctagggaatatatcatgatcggcataaaactttcactcttggatcctagtctgcagctccatgggaaagcggctcccgccctgtgtgatgagctccggggctgtgagccaactgggctgacctcaagattcacgagagccttacagtcacaagggccaactgtgggccagattttcatctggcctgtgaagtacagattgcctcatcgctggacaaatactctgggtggaaggccattgtgggaatacgtggcagtgccaagcactgaagaggataaatcctccagcgtatttcccaacacagtggcctggctgttgtattcacctatagagaagaggggaaatgacagcatggggagaaaggaggaagaaatagtagtttcctatgatatgggtgggatggttcccgtgaggggtagagaagtccgtggagtcatactgatttggagacagcttccagatgctgtgtctgtaaacatacagaaagatcagatccctctgtggggttgttccatagctgttccttggctgcaggaaatggatctcttactaaaagaccattttgtcctatgtcatcaaaggaacggggacagtttgccagctgtgctgggtaaccttcctgccagggctgccatgcacccacaagcccagagtcccccaacaggctgtgatgtcacctcaggacatgcagatacagcagctgggtatactgttgctgagctctcagttgctggaaccgatgtgtcaccttctctggtgtaccacactgcctcagctcaccaaagactgagcccctgtgaagactctctcaaacctgtgctgcccatgagagttaggttgggatgcacttcctgccgctgccaagtcctggcattgacccaggacatcaggaccacagctgccaaggaagacaagacagtgctgtacacgagccaagtcaagagtctggacatctcaggggtgtctccactagaggaagtacaggaagagagaaccgccaggaagacccttaactgtaccattgtgacctgtaaccacccaagaaactcaaccaagaggtggaccctcaggaaatgtgaagagatgacacccctgggccagcttctggcctacactcttcttaaaggttccagaagcctcacagtgttgtctagcaatatggtcaatggtccactatga

SEQ ID NO: 95 - DNA, 4125 bp, Mus musculus
ctgagtcacccacccaccctggcttttcttccttccccctttgcatctgattatttggggagctgaaaacttggaggtgtccctgaggcccgccccttctaactctccccgccctacctcggcttggaggaaaatggaactcgcccggaagctgccactaccccctaaggacatggaaggcacggagggagccagaggtgcccatggagagacctcggctggcagaatacaatagcagacatggtgttcgggctgcccgtgtgtcctctgaaggttctgggagagaaggggagtctagtccacaccgactggagtccttctgggctgcctttgcgctcacctctcaaggggatctttctgtaaaaggaaacgtgtggcttccagggtcactggtatttggagagcaagactggattggcataggcaggcctgtgcaggtagcaccaagcttctgggctccagacaagcaccagcctacagtgggagagggtgaggcccagctgcccagaaggagtgccaaggccggcagaggactggccctggaaggtcccgggatctcccgtcacctccatgctctagagagctgaccgcagaagggagaaaggagcggagagaaggccacaggaggcaccatgttccgcaagaaaaagaagaaacgtcctgagatatcagccccgcagaacttccagcatcgtgtccacacctcctttgaccccaaggaaggcaagtttgtgggtctgcccccacaatggcagaacattctggatactctgaggcggcccaagcctgtggtggatccttctcgaatcacacgggtgcagttgcagcccatgaagacagtggtacggggcagctcagtgcccacggagggctacatctccgggctgctcaacgacattcagaagttgtcagttatcagctccaacaccctgcgtggacgcagccccaccagccggcggcgggcacagtccctggggctgctgggagatgatcagtgggctgctgaccccgatatgtacctccaaagcccccagtcggagcacactgatccccatggcctctacctcagctgcaatgggggcacaccagcaggtcacaggcaggtgccctggccagaaccacagagcccgcaggccctgcccaatgggatggctgccaaggcgcagtcactgggccctgctgagttccagggtgcctcacaacgctgcctgcagcagctgggtgcctgcctgcagagttccccacccggtacctcaccccctatggccacagggaggcgtggggtgaaggttgccaagcatagctccgaagaggcccggcctcagtcctgcctggtgggctccgccattggcaggccaggtggagaaggcagccctagccctaagaaccaggaaagcagcctcaagcaccggctcttccgaagcatgttcctgtccactcctgccacaggcgcggcaagcagcagcaagccggtccctctgccacagaacaagcccaattctgctttccgaccaccacaaaaagactcctcttcaaacctggtagccaaggcccagtccttgccctcagagcagcccatggggaccttcagtcctctgaccacctcagataccagcagcccccagaagtccctccgcacagctccagccgctggtccacttccaggccggtcttctccagcaggctccccccgtacccggcatgctcagatcagcaccagcaatctctacctgccccaggaccccacagtggccaagggggccctgggtggcgaagacacgggcattgtgacccatgaacagttcaaggctgcgctcaggatggtggtggaccagggtgaccctcggctgctgctggacagctacgtgaagattggggagggctccacgggcattgtgtgtctggcccgggagaagcactcaggtcgccaggtagcagtcaagatgatggacctcaggaagcagcaacgcagggagctgctctttaatgaggtggtgatcatgcgtgactaccagcacctcaacgtggtggagatgtacaagagttacctggtaggagaggagctgtgggtgttgatggagttcctgcagggcggggccctcacagacatcatctcccaagtcagactgaatgaggagcagattgccactgtgtgtgaagctgtgcttcaggccttggcttacctgcacgcccagggtgtcatccaccgagatatcaagagtgattccatcctgctgacccttgatggcagggtgaagctctcagactttgggttctgtgctcagatcagcaaagatgttcccaagagaaagtccctggtaggaactccatactggatggctcctgaagtgatctccagatccctgtacgctactgaggtggatatctggtctctgggcatcatggtgattgagatggtggatggagaacccccctacttcagtgactccccagtgcaagccatgaagaggctgcgggacagcgccccacccaagctaaagaactcttacaaggtctctccagtgctgcgagacttcctggatcggatgctggtacgggaaccccaagagcgagccacggcccaggagcttctggatcacccgtttctgctgcagacggggctgcctgagtgtctggtgcctctgatacagctctaccgcaagcagacctccacctgctgagcccgcacccagggtgcacctgccacctgtgcccacaggcaaaggacactggacagccgttccattggcaaggcctacccgccttgccctctcagtgttctctccaaagatcgaatgtgaagctccgcaccttccctcctgcccttttgcccgctgggccaggccggacctgccccccttggtttcactccccagagtcccagttgcctttgggatgacagtgaccccttctgcaggtttggccctttgttatttgcacagggatgtttctaagaaacgcggagagtggtgctcttggccgcaagccagcaaagccgacaggctgctgcagatttttaaaggcagtgtccacagtgacctggggcaaccaagagggtgcatgctccatctccacatggacacttgctattctcaactgaagcttcaaaccctggagtcccagagggccacggggaaggatttcgctgcctgaatccttcttcctcctctggtctgacttctggaagccccacttgcacctgtttcctgtctgttccctggcactgcctcgccctagaaaacctctacggaactgtgaatagcctgtgtgtagaccatgagagcagccaggggggaatcttctgagagagagtggggttggcagtaaacgtggttccattgtccaggatgtagagaacattctctctctctctctctctctctctctctctctctgtgtgtgtgtgtgtgtgtgtgtgtgtgtgtgtgtgtaaacttcccccagtggcccaggtccttccagtcacccacagagagcctcagaagagctgtccacctcttttctaccaagctccattctgaaggaatctgctttttggacctggctttctgcctctcaagtctcatgttattacctaaacagggaaggggtgtgtgtatgtcaagtctaacacatgctgggggccctcaaagtttctgagtttctcccatactgaggcaggaatagtaagggaataaactttgttttacctgtcagcaacttcttagcggccagatcagggacccctccttttcagaaccctgggctgggacagaaaggtgaaccacctcccggagggggtccctcatgccgagcgagggatgggcacctcctctgtgagcctgctgccccagctgtcctgttgatacttccctgcctccttgacctccctcccttcccaccttcctggctgttgtgagacagggaatgccaaggaagaactctagtgtctggacccgatccagataatatttttagactcctctgttccctgatgacctgcattagggcaaaaaaaaaaaaaaattgcaaggtcttttttttttttttaagggtcagagttttaaaaaaacaaaagcatccttccctagacatttttgtgacttgtttgcacttgtgcctgttttaaattaaactaaatgttcg

SEQ ID NO: 96 - DNA, 2201 bp, Mus musculus
aagcagataagaaccgggctcgtgtggaagagaactttctgaagctgacacatgtgcagagacaggaggctgcacagtctcggcgtgaggagaaaaaaagagctgagaaggagcggatcatgaacgaggaggaccctgagaaacagcgcaggctggaagtttaagtttttgaagttgaagtaggtctacacagtaggaacccatgtcttttcttgtaagtaaaccagagcgcattaggcggtgggtctcggaaaagttcattgttgagggcttaagagatttggaactgtttggagagcagcctccgggtgacactcggagaaaagccaatgaggcgagctcagagtccatagcatctttctccaaaccagagatgatgagcagctttcttccagagggcgggtgttatgagctgctcaccatcataggcaaagggtttgaggacttgatgacagtgaatttagccaggtacaaaccaacgggagagtatgtgacagtacgaaggatcaacctagaagcttgttccaatgagatggtgacattcttgcagggggagcttcatgtctctaaactcttcagccatcccaatatagtaccgtatcgagccaccttcatcgcagataatgagctgtgggtcgtcacatcatttatggcgtacggctctgcaaaggatctcattggcacacacttcatggatggcatgaatgaactggcgattgcatacatcctgcagggggtgctaaaggccttagactacatccatcacatgggctatgtgcacaggagtgtcaaggccagccacattctgatctccacggatgggaaggtctacctgtctggtttacgcagcaaccttagcatgattagtcacgggcagcggcagcgtgcagtccacgatttccccaaatatagtatcaaggtcctgccttggctcagcccagaagtcctccagcagaatcttcagggttacgatgccaagtccgatatctacagtgtgggaatcacagcatgtgaactagccaatggccatgtccccttcaaagatatgcctgccactcagatgctgctagaaaaacttaatggcacagtgccctgcctgctggacaccagcaccatccctgccgaggagctgaccatgagtccctcccgctccatcgccaaccctggcctgaatgacagcctggctgctggtagcctccggccttccaatggcgactcgccttcccacccctaccaccgaaccttctcgcctcacttccacaactttgtggaacagtgccttcagcgcaaccctgacgcaaggccaaacgccagcaccctgctgaaccactccttcttcaagcagatcaagcggcgtgcttccgaggctttgcctgagttgctccgcccagtcactcccatcaccaacttcgagggcagccagtctcaggatcacagtggaatcttcggcctggtgacaaacctagaagacctggaggtggatgactgggagttctgagtctctgcagcctgtcctccagctggctggcgtggggtatgagcctggggccttcttgaggaccagcatctgcctctggccacagactgggttcaaaggatattctgcctgccaagctggctgttggctacttgaaaggacattctagaagggacttcactgtttttgtggcttttgagacccagggaatcccaatcaccagggacttggagaggccggaaagctgacatcctgttgtgtgagctcaggggacctccttagaaggaagaagtgctgcatgggccccgaggctcacggccaggcccagagtaactcttgacccagggaccttcacatcctcttcccaacacttgctctcagtagcctagtccctcttccctctgttcccatgtcctgaagggctgaaaggggacaagtcctaagctgtctggccctgcccagccgcaggcattgccccagctactgagcaccaggtcagttaaggctgggactggccatcctcatctccacctctcgtgggccctgacacctgaaaccatcttagctcatttattacactcctttcccaagaatccatcttactgcctcctgccagctgctgccttggtgcctcctccaagggccatacatgtcttgcctcatctgagggcttaagagtccttaagttgtattagtttcattgtcagaacaaattaaaattttc

SEQ ID NO: 97 - DNA, 4062 bp, Mus musculus
gactggaccgcgaggtcagatcaggttgtcaccccctcccctccaggggaggcttcccgggcccgcccctcaggaagggcgaaagctgaggaagaggtggcgagggggaaggtctccttgcccctctccctgcttgtcagagcaactggagtaccccaggcggaagcggaggcgctggggcaccatagtgacccctaccaggcaagatcccaatctcagggccccctggggccatcatgccagctgggggccgggccgggagcctgaaggaccctgatgtggctgagctcttcttcaaggatgaccctgagaagctcttctctgacctccgggagatcggccatggcagctttggagcagtgtactttgcccgggatgtccggaacagtgaggtggtggccatcaagaagatgtcctatagtgggaagcaatcaaatgagaaatggcaggatatcatcaaggaagtgcggttcttacagaagctacggcatcctaataccattcagtaccggggctgttacctgagggagcacacagcttggctggtgatggagtattgcctgggctcagcttctgatcttctagaagtgcacaagaaacccctgcaggaggtagagattgcagctgtgacccatggggctcttcagggcctggcatatctacactcacacaacatgatccatagagatgtgaaggctggaaacatcttgctgtcagaaccaggcttggtaaaactgggggactttggctctgcgtcaatcatggcacctgccaactcttttgtgggtactccatactggatggctccagaggtgatcctagccatggatgagggacaatatgatggcaaagtggatgtctggtccttggggataacctgtattgagctagcggagcggaagccaccactgttcaacatgaatgcaatgagtgccttataccacattgcacagaatgaatctcctgctctccagtcaggacactggtctgagtacttccggaattttgttgactcctgtcttcagaaaatccctcaagacagaccaacctcagaggttcttttgaagcaccgctttgtgctccgggagcgaccgcccacagtcatcatggacctaatccagaggaccaaggatgctgtacgggaactggataacctgcagtaccgaaagatgaagaagatactgttccaagaggcacccaatggccctggtgctgaggccccagaggaagaggagctcacaccctgttcccaggaggcagaaccttacacgcaccgtgcagggacactgaccagtctagagagcagccattcagtgcccagcatgtccatcagcgcctccagccagagcagctcagtcaacagcctagcagatgcctcagataatgaagaagaggaggaagaagaagaggaagaggaggaggaggaggaggaagaaggccctgaatccagagagatggccatgatgcaggagggggagcatacagtcacttcccacagctccatcatccaccggctgccgggctcagacaacctatatgatgatccctaccagccagagatgaccccaggtccactccagccacctgcagcccctcccacctccacctcctcttctgctcgccgcagagcttattgccgcaaccgagaccactttgctaccattcgtactgcctccctggtcagccgtcagatccaggagcatgagcaggactcagccctgcgagagcagctgagtggctacaagcggatgcgacgtcagcaccagaagcaactgctggccctggagtcccgtctgaggggtgaacgtgaggagcacagtgggcggttacagcgggagctcgaggcacagcgggctggctttgggaccgaggctgagaagctggcccggaggcaccaggccattggtgagaaggaggcacgggctgctcaggcggaggagcggaagttccagcagcacatcctggggcagcagaagaaggagctggccgccctgctggaggcgcagaagcgaacctacaagctgcggaaggagcagttgaaagaggagctccaggagaaccctagcacacccaaacgagagaaggctgagtggctgttgaggcaaaaggagcagttgcaacagtgccaggcagaagaggaagcggggctgctgcggaggcagcgccagtactttgaacttcagtgtcgccaatacaagcgcaagatgctactggctcggcacagcctagatcaggacctgcttcgagaggacttgaataagaaacagacacagaaggacttggagtgtgctctgctgttacggcagcatgaggctacccgagagctggagctaagacagctccaggctgtccagcgcacacgtgctgaacttacccgccttcagcaccagacagaactaggcaaccagctggagtacaacaagcgacgggagcaagaattacggcagaagcacgcggcccaggttcgccagcagcccaagagcctcaaagtacgtgcaggccagctacccatgggcctccctgctactggggctctgggaccactcagcacaggcacccctagtgaagagcagccttgctcatctggccaggaggcaatcctggaccaaaggatgctgggagaggaggaggaagcagtgccagagagaaggattctgggaaaggaagggactaccttggagccagaggagcagaggattctgggggaagaaatgggaacctttagttccagcccacaaaaacataggagtctggctaatgaggaagattgggatatatctgaggagatgaaggagattagagtcccatcactggcatcccaggagagaaatattattggccaggaagaggcagcggcatggagtctgtgggagaaggagggtgggaaccttgtggatgtggagttcaagcttggctgggtccagggtccagttctgactccagtcccggaggaggaagaggaggaggaagaagagggaggggctccaattggaacccacagggaccctggagatggctgtccttccccagatatccccccagagccacctccatcacatctgagacagtaccctactagccagctccctggactcctgtctcatggcctcctggctggcctatcctttgcagtggggtcctcctctggcctcctgcccctactcctcctgctgctactcccattgctggcagcccagggtggaggtggcttgcaggcagcactgctggcccttgaggtagggctagtgggcctgggggcctcctacctgttcctttgtacagctctacacctgccccccggtctgttcttactcctggctcagggtactgcactgttggctgtccttagcctgagctggcgcagaggccttatgggtgtgcctctgggccttggggctgcctggctcctagcttggcccagcctggctttacctctggcagctatggcagctgggggcaaatgggtacggcaacaaggcccccagatgcgtcggggtatctctcgactctggttgaggattttgctacgcctgtcacccatggtctttcgggccctacagggctgtggggctgtaggagaccgggggctgtttgccctgtaccctaagaccaataagaatggtttccgaagtcgactacctgtcccttggccccgtcagggaaatcctcgcactactcaacaccccctagctcagttaacaagagtttgggctgtgtgcaagggctggaactggcgcctagcacgggctagccacagattagcttcttgcttgcccccctgggctgttcatatactagccagctggggcctgcttaagggtgaacggcctagtcggatccctcggctgctgccacgcagccaacgccgtcttgggctctctgcttcccgacagctaccaccagggactgtagctgggcggagatctcagactcgcaggaccctgcctccctggaggtaaccagttccaattctccacccaaatttagggcactgagcactttatctcccatgactcagtaaagtttctccagtctcccagcctctcctccccttctgacctt

SEQ ID NO: 98 - DNA, 3062 bp, Mus musculus
ttcatggggcttcttgcagacctcccatccatgggcttcaaacagaagacgctgtagatttgaagaataaaatgtgaagacagcccgactgctctttgttctcgaggacgacacatcctaagtgcagaagtgaggagagactgctgctacaatgttccagagccactcagtgggggctgtgccatacatcaaaaggaactgaaggtttataagaaaagttgtagtcaatgagagagacaaaaggactgagccatccacaagcaccgtgcttgccacaccggccaccatgcgtaaaggggcactgaaggacccagagattgctgatctgttcttcaaggatgaccccgaagagctttttatcgatttgcatgaaattggacatgggagctttggagccgtgtactttgcgacaaatgcgcacaccaacgaggtggtcgctgttaagaaaatgtcctacagtgggaagcagacccatgagaaatggcaagatatccttaaggaagttaagtttctgcagcagctgaagcatcctaacaccatcgagtacaaaggctgttatttaaaggagcacactgcatggttggtgatggagtactgcctaggttcagcctctgacttgttagaagttcataagaaaccacttcaggaagtggagatcgctgctatcacccatggtgccttgcaggggctggcctacctccactttcactccctgattcacagggacattaaagcagggaacatcctcctcacagagccaggtcaggtgaagctggctgacttcggatctgcctccatggcttctcccgccaactcctttgtggggactccttactggatggccccagaggtaatcttagctatggacgaagggcagtacgacgggaaagttgacatctggtcgcttggcatcacctgcatagagttggcggagcggaagccccccctcttcaacatgaacgccatgagcgccctctaccacatcgctcagaatgactcccccacgctacagtccagggaatggacagactccttcaggagattcgttgattactgcttgcacaaaatacctcaggaaagaccagccgcggtggagctgttgcggcatgacttcattcggagggagcggccaccgaaggtcctcattgatctcatacagaggacaaaagatgctgtccgagagctggacaacctgcagtacaggaaaatgaagaagatcctcttccaggagactcggaacggacccttgaatgagtcgcaagaagaagaagaagatggtgagcaaggaagcaacctgaaccgagaggtggacagtctgggcagcatccactccattcccagcacatcagtgagcacaggcagccggagcagcagtgtgaacagcatgcaggaggtcatggatgagagcagctctgagctcgtcatgatgcaggaggatgaaggcacagccaactccagcgcctccacggtacacaagaaggatcatgtattcgtaagggatgaggcgggccacggcgatcccaggcctgagccgcggcctacccagtcagttcagagccgggccctccactatcggaaccgagagcgctttgccacgatcaaatccgcgtctttggttacacggcagatccatgagcatgagcaggagaacgagctgcgggaacagatgtcaggttataagcggatgcggcgccagcaccagaagcagctgatcgccctggagaacaagctgaaggctgagatggatgagcaccgcctcaagctccagaaggaggtggagacgcacgccaacaactcgtccatcgagctggagaagctggccaagaagcaagtggctaccatagaaaaggaggcaaaggtagccgcagcggatgagaagaagttccagcagcagatcctggcccagcagaagaaggacttgacaactttcttagaaagtcagaagaagcagtacaagatttgtaaggagaaaataaaagaggaaatgaacgaggaccatagcacacccaagaaggagaagcaggagcggatatcgaagcataaagaaaacctgcagcacacgcaggccgaggaggaagcccacctgctcactcaacagaggctgtactacgacagaaactgccgcttcttcaaacggaaaataatgatcaagcgccacgaggtggaacagcagaacattcgggaggaattaaataagaagaggacccagaaggaaatggagcacgccatgctgatccggcatgatgaatccacccgagagctggagtacaggcagctgcacaccctgcagaagctccgcatggatctgatccggctgcagcaccagacggaactggagaaccagctggagtacaataagaggcgggagcgggagctgcaccggaagcacgtcatggagcttcggcaacagccgaaaaacttaaaggccatggaaatgcaaattaaaaaacagtttcaggacacttgcaaagtacagaccaaacagtacaaagccctcaaaaatcaccagttggaagtcactccaaagaatgagcacaaagcaatcctaaagacactgaaggacgagcagacgaggaagctggccattttggccgagcagtatgaacagagtataaacgagatgatggcctctcaagcgttacggctagacgaggcacaagaggcagagtgccaggccttgagactacagctccagcaggagatggagctgctcaacgcctaccagagcaaaatcaagatgcaaacggaggcccagcacgagcgcgagctacagaagctagagcagagggtgtccctgcgcagagcgcatcttgagcagaagattgaagaggagctggctgccctgcagaaggaacgcagtgagaggatcaagactctcctggagagacaagagcgagagaccgagacttttgacatggagagcctcagaatgggctttgggaatttggtgacattagattttcctaaggaggactatagatgagattaaatttttttgccattttcaaaaaaaaatgaaaaagaaaccaaaaaatttcaaccctgtgaaattaattcccatt

SEQ ID NO: 99 - DNA, 5149 bp, Mus musculus
gaggctgggggcggcggcggcggcgcgagcggcgggcggcgcggggcggtccggcgggttcaaagaggaaaacatggcggaaaacaaaggcggcggtgaggcagagagtggcggcgggggcagcggtagcgcgccggtaaccgccggggccgccgggcccacggcgcaggaggcggagccgcctctcgccgcggtgctggtggaggaggaggaggaggaaggcggcagggctggcgcggagggcggtgcggctgggcccgacgacgggggggtggccgcggcctcctcaagctcggccccggccgcctcggtccccgcggcctcagtgggctccgcggtccccggaggcgcggcatcgacgccggctccagctgctgccccagccccggccccggccccggccccggccccggccccggcccccgctcccgccccggctcctggttcctcgtcggggccacctctcggaccaccagcctcgcttctggacacctgcgcggtgtgtcagcagagcttgcagagccggcgcgaggcggagcccaagctgctcccctgcctgcactccttctgcctgcgctgtctgccggagccggagcgccagctcagcgtgcccatccctgggggcagcaacggtgacgtccagcaagttggtgtaatacggtgtccagtatgtcgtcaagaatgtagacagatagatcttgtggataattattttgtgaaagacacatctgaagctcctagcagctctgatgagaaatcagaacaggtatgtactagttgtgaagataatgcaagtgcagttggtttttgtgtagaatgtggagagtggctgtgtaagacatgcattgaagcacatcaaagagtaaaattcactaaagaccacctgatcaggaaaaaagaagatgtctcagagtctgttggaacatctggtcagcgcccagtgttttgtcctgtacataaacaagagcagttgaaactattctgtgaaacgtgtgatagattgacgtgtagagactgtcaacttttggagcacaaagaacataggtatcagtttttagaagaggcttttcaaaatcagaaaggtgcaattgaaaatctgttggctaagcttcttgaaaagaagaattatgttcattttgcagctacacaagtgcagaataggattaaagaagtaaatgagactaacaaacgtgtagaacaggaaattaaagtggccatcttcacccttatcaatgaaattaataagaaaggaaaatctctcttgcaacagctagagaatgttacaaaagaaagacagatgaagttactacagcagcagaatgatatcacaggcctctcccggcaggtgaagcatgttatgaactttacaaactgggccattgcaagtggcagcagcacggccctactttatagcaagcgtctgattacttttcagttacgtcatattttgaaagcccgatgtgatcctgttcctgctgccaatggagcaattcgtttccattgtgatcccaccttctgggccaaaaatgtagtgaatttaggtaatctagtaatagagagtaagccagctcctggttatactcctaatgttgtagttgggcaagttcctccagggacaaaccacattagtaaaacccctggacagattaatttagcacagcttcgactccagcacatgcagcaacaagtgtatgcacagaaacatcagcagttacaacagatgagactgcagcaaccaccagctcctataccaacaacaacagcaacaacccagcagcatcctaggcaagcagccccacagatgttacaacaacagcctccaagattgatcagtgtgcaaacaatgcaaagaggcaacatgaactgtggagcatttcaagcccatcaaatgagactggctcagaatgctgccagaataccagggatccccaggcacagtgcccctcagtattccatgatgcagccacatctccaaagacaacattcaaatccaggacatgctggaccgtttcctgttgtatcagcacacaacccaatcaacccaacaagtcccaccacagcaactatggcaaatgcaaatcgaggtcccaccagcccgtctgttacagcaatagaattaataccctcagtcaccaatccagaaaaccttccatcgttgccagatatcccacctatacagttggaagatgctggctcaagtagtttagataatctactgagtagatatatctcaggcagtcatctaccccctcagcctacaagtaccatgaatccttccccaggaccctctgcgttatcacctggatcttcaggcttatccaattctcacacacctgtgagaccccctagcacgtctagtactggcagtcgaggcagctgcggatcatcaggaagaactgctgagaaaagtgctcatagtttcaagtctgatcaggtgaaggtcaagcaggaacctgggactgaagaagagatatgcagcttttcaggagctgtgaaacaagagaagacagaggatggcaggaggagtgcctgtatgttgagcagtcctgagagtagtttgacaccacctctttcaactaaccttcacctagagagtgagctggatacattaacaggcctggagaaccacgtgaagactgaacctacagatatcagtgaaagctgcaaacagtcaggactcagtaacctagtcaatggaaagtctccaattcgaaacctcatgcacaggtcggcaaggattggaggggatggcaatagcaaagatgatgacccaaatgaagactggtgtgccgtctgccagaacggaggggatcttttgtgttgtgagaaatgtccgaaggtctttcatcttacctgtcatgttccaacacttctcagctttccaagtggagactggatatgcacattttgcagagatattgggaagccagaagttgaatatgattgtgataatatgcagcatagtaagaaggggaaaactgcacaaggcttaagccctgtggaccaaaggaaatgtgaacgtcttctgctttacctctattgtcacgaattaagtattgaattccaggagcctgttcctgtttcgataccaaactactataaaattataaagaaaccgatggatttatcaacggtgaagaagaagcttcagaaaaaacattcccagcattaccaaatcccagatgactttgtggctgatgtccgtttgatcttcaagaactgtgaaaggtttaatgaaatgatgaaagttgttcaagtttatgcagacacacaagagattaatttgaagggtgattcagaagtagctaaggcagggaaagcagttgcattgtactttgaagataaactctcagagatctactcagacaggaccttcactcctttgccagagtttgagcaggacgaagatgatggtgaagtaacagaagactctgacgaagattttatacagcctcgtagaaaacgcctaaagtcagacgagagaccagtacatataaagtaaaatgactcggacttaaatcggttgttaagaagaaggaaacaaaacaaaacacccttttatttaagtgttgctggaatatcctgtgtacagtggttttacctccttacagaagctggtagctttcatacagtattagattgaaataatggaaacagaaaacattcttgtcaagaaaaggggagagaactctgtttgcaactttaagaacaaaattagaagtgaaaaaatttggggatttgctacaaatgaagacggttctctggctgttagaaatgtagatgatcatgtctgataattggtgcaggatactgagttgggcaagcctgcgagatgtgtctctgctggagcacacaggtactcaagataacttaaaagccttcccctccacagatacaaatgggttgttttctggttaaaagtgagtacatgagattccacttgaatgtcactaaagatgcattgaatcatgccactgcattttctctcattttgatctatttggccttagtttttaagttggtttaaagaactcagcagtagttttattttattcttagatgtagggtctaggaacataaccattgatcgtttagtcaacttcggtggtgtactaaaatgatgataacttttagtagtggatcatacagatttatggaagtcatttccagaaaaccctccaaacaattacacttactggtcaaatcatctgatcacgcagttagtcattcccctgaaagcaggacatttatttcagaattttctgtgtaggttaattagattgagaaggtgacaactttaacctagtcttcttcataccagtttccagtagaccactattggtaaacagaaatctgtcagctaccaaatgtgtacaattttctgtatttcactttgtcttatttgtaaatagtgagctcagacttctggcagatcagcaacatttgctgagcctgttttttaagctaatgtgtattcttactaatgttcctaccaagaatggatttgtaatatatgctgtctatttctaatgttcacattcatattttgaggttctatcttattttaatagagaacagacgtctcaaaaaatcttcagaagcagcttattattgaaatatcaaaatactgaaataaacccggtggggttagattactcatctgtccaccaagtgggacacgtgcatggactgggggctttgaatgacttagaagagacctttaagtaaatcctgagaacgagccaatccccacttgaatggtaattggaacaaacccaaccttgttactacctgacggcaggagccgacctgcagcagacaggtgtgctcgctcgggtttatcttcctcctctgcgttgtgacgctcagatcaagtgtgctctagactgtgtgcgcctctccgctggattaagagttgtagtcctacttctgtatggacacagtagaatataaagtgaccaaagtagaattcaacatcagaaacatttcaggtgtcagcagatgtgtggcaaatcatttgcctctcaaaaagttcaaagtaaggagttcagactgtagacctcctcagaaagctatttgacgtaaatgtcgaagaagtgaatatttttagtgtgcattgaatcaaataaagtgctctaaagaaattatt

SEQ ID NO: 100 - DNA, 5978 bp, Mus musculus
tccgctgccgccgcggccacctaatcgctggctgttcaggtggctgtcgcctggatgtcctcctaatcttgggggccccgggccagactcggctgggctcccttcaccctccactgtaatcatgagtgcgattgggactctgcaggtgctgggtttccttctcagcctggcccggggttccgagatgggcaactctcaggcagtatgtcctgggactctaaacgggctgagtgtgaccggcgatgctgacaaccagtaccagacactgtacaaactctatgagaagtgtgaggtggtcatgggtaacctggagattgtgcttacgggacacaatgctgatctttccttcctgcaatggatccgagaagtgacaggctatgtactggtggccatgaatgaattctctgtactgcccttacctaacctccgagtggtccggggaacccaggtctacgatgggaagtttgccatctttgtcatgttgaactacaataccaactccagccatgctctgcgccagctccggttcactcagcttactgagattctgttagggggcgtttacattgagaagaatgacaaactttgccacatggatacaattgactggagggacatcgtgagggttccagacgctgagatagtggtgaagaacaacggggggaactgtccaccctgtcacgaagtctgcaaggggcgatgctgggggcctggaccagaagactgccagatattgaccaagaccatctgtgcccctcagtgtaacggtcgctgcttcgggcccaatcctaaccagtgctgccacgatgaatgtgcaggtggctgctctggaccccaggacacagattgcttcgcctgccgacacttcaatgacagtggtgcctgtgtgcccaggtgtccagcgccccttgtgtacaacaagctaacgttccagcttgagcccaacccccatatcaagtatcagtacggaggagtctgtgttgccagttgtccccataactttgtggtggatcagacattttgtgtcagggcttgtcctgctgacaagatggaagtagataagaatggactcaagatgtgtgagccttgcagagggctgtgcccaaaagcctgtgaggggacgggctctggaagccgctaccagaccgtggactctagcaatatcgatgggttcgtgaactgtaccaagatcctgggcaacctggacttcctcatcactggcctcaatggtgacccctggcacaagatccctgcactggacccggaaaagctcaatgttttcaggacagtccgggagattacaggctacctaaacatccagtcctggccccctcacatgcacaacttcagtgttttttccaacctgacgaccatcgggggcagaagcctctacaatcggggcttctccttgttgatcatgaagaacttgaatgtcacgtctctgggcttccggtccctgaaggaaattagtgctgggcgtgtctacataagtgccaatcagcaactttgttaccaccactctctgaactggaccagacttctgcgggggcccgcagaggagagacttgacatcaagtacaaccggcctctgggagaatgcgtggcagagggcaaagtgtgtgatccactgtgctcctctgggggatgctggggcccaggccctggtcagtgcttgtcttgtcgaaactacagccgggaaggtgtctgtgtgactcactgcaacgttctgcaaggggaaccccgagagtttgttcatgaggctcattgcttctcctgccatccagaatgccagcccatggagggcaccagcacgtgcaatggctcgggctccgacgcttgtgctcgatgcgcccattttcgtgatgggccccactgtgtgaacagctgcccccatggaatcctaggtgccaaaggtccaatctacaaatatccagatgctcagaatgagtgccggccctgccacgagaactgcacccaagggtgtaagggaccagaactacaagactgtttaggccaagcagaggtattaatgagcaaaccacacctggtcatagcggtgacagtaggactgactgtgatcttcctgattctgggaggctcttttctctattggcgtggacgcaggattcagaataaaagggctatgagacgctacttggagcggggtgagagcatcgagcctctggacccaagcgagaaggcaaacaaagtcttggctagaatcttcaaagagacagagctgaggaaacttaaggtgcttggctctggtgtctttggaactgtacacaaggggatttggattcccgagggtgaatccatcaagattccagtctgcattaaagtcatcgaggacaagagtgggcggcagagttttcaggctgtgactgatcacatgctggccgtcggcagcctggaccatgcccacattgtacggctgctgggactgtgcccagggtcatctctgcagcttgtcactcagtacttgcctctgggctctctccttgatcatgtaagacagcaccgtgagacactgggaccacagctgctgctcaactggggagtacaaattgccaagggtatgtattacctcgaggaacacagcatggtgcatagggaccttgcgctccggaatgtgatgcttaagtcaccgagtcaagtccaggtggcagattttggtgtggctgacttgctgccgccagatgacaagcagttactacacagtgaggccaagactccaattaaatggatggcccttgagagtatccactttgggaaatacacacaccagagtgatgtctggagttacggtgtaaccgtttgggagttgatgaccttcggggcagagccctacgcagggctacgactggctgaaataccagacctgctggagaagggagagcggttagcacagccccagatctgcaccattgacgtctacatggtcatggtcaagtgttggatgattgacgagaatattcgcccaacctttaaagaactggccaatgagtttaccaggatggcccgggacccaccaaggtatctggtcatcaagagagcgagtgggcctggaatacctcctgcagcagagccatctgctctgagcaccaaagagttgcaggatgcagagctggagccagacctggacctcgacctagacgtggaggtagaagaggagggcctggcgaccacactgggttctgccctcagcttgcctacaggaacgcttacccggccacgtgggagccagagtcttttaagtccttcgtctggatacatgcccatgaaccagagcaaccttggggaggcttgtctggattctgcggttttggggggtcgcgaacagttctcccgtcccatctctctgcacccgatcccacgggggcgtcaaacgtcagagtcatcagagggccatgtgacgggctctgaggctgaactccaagagagagtatcaatgtgtaggagccggagccggagccggagcccacggccacgtggggacagtgcctaccattcgcagcgacacagcctgcttactcccgtcaccccgctctccccaccagggttagaggaagaggatggcaatggttatgtcatgccagatacgcacctcagaggtacatcctcttcccgggaaggcaccctttcgtcagtaggtctcagttctgtgctgggtaccgaagaggaagatgaagatgaggagtatgaatacatgaaccggaagaggaggggtagcccggctcggccccccagacctggttccctggaagagctgggctatgagtacatggatgtgggttcagacctcagtgcttctctgggcagtacgcagagttgcccactccatcccatggccatcgtgccctctgctggcacgactccagatgaggactatgaatacatgaaccgcaggcgtggtgcgggcggttccggaggggattatgcagctatgggggcctgcccagcagctgaacaagggtatgaggaaatgcgagctttccaggggcctggacatcaagccccccatgttcgttatgcccgcctcaaaactctgcgtagtttagaagccactgactccgcctttgacaaccccgattactggcatagcaggcttttccctaaggctaacgcccagagaatttgacctcggttccttgagactcttggggaacatttgatggcagctagtgcctctttgagggtaacccttcctcacccctttctctgaggtcccacctccatttctccaagaatgccatctagttcttggagatttgtcaacatatcgtcacaaactttttgcggtacatagccggctgtgcactctcttctcttcccaagcctaggaaagagaagtttccctgtgtctctcccttcctgatcccgttcctcagggagactccctggagatatgaaggattactctccagaccctttctctcaggctcttactcattgggattagactcttaaactttgcctttcttccccaatcagactctaaagaaggggagatgaaagagaagagaaaaagtaagacttttgtttatgagacttttaatcccagaggaagattgagaagctcaaagctttgaggagtgaagttaggagtaggtaccagtgactacgaactgaacatgcactgtgagccaggcatcctcatactgaaccccacctacattgtctcagttataatctttccagttttgtgaggtagaactgatcctgtttcaccaatatggaatctgagtgttccaagatagccaacaggtcccggaatctttgaatagtactgaatcctgtagggttttttttttcttttaatatttttaatatttttttaatattcagtaaacaaaactgaattctgtgattagtgacttttccatcttaactaagaacttattgttctttttagtttgaggtgacacagcagaggttgtactgatttttctatttttctaatttaatggatttgttattatagacattacaacccccccccccgtgaagtcaagaatttccaccttttctcaaacaaaaaaccatttctttgacacatttgaattaatagcaggacttgccctttgggcccattcttaggtaagatgagggtctttgagcacaagtactatgagatctgtcagtcaatctaataaccaggcaggtaattaagtggctcaagagcaaataggttattcagtgcgggtgtaccaggcagagatgattcatctaccaagtggaacaggagaggccggctgtgatttcatcgtgctattcagaatgggtactatgtaaactgtaaggattatttatttcaggaacttgtcactcagcatgtttcagatgacagttgaccacaggttactaaaactgtggacagcaaaacctcagaaaatggggaattgagccttgaagaagcaaagccacaggtccaggattcaaaatcctcccaattcccatgcctgtgatttaactataaagtgtatgtgtgtgtgtgtaaagccgggcctggcgactggcctgcaactgtgtagcccaggatggccttcaactccacacacagcaatcccatcttcacctctcaaaggctgtggctacatgtgtgagcttccagactccgtttgttggtgcactgaatcaagcaaatgcagccagccacgttttcctccagcacccaggcctctcatctcaggaaggagtggagatgacacaggacaagtaactagacatttttgtgtaagctgcaggccatttacgttgcagatacacactcattacaagccaattcgcaaaggttccaagactcctattttgggagctgttctcaaccagtagtgataaacttctggtgggatagaaagaggatccatcttcaaacctcaagtcttcctggatgggaactggggggaatgtcttcttgtaccattaaagtttttttgttttgtttttatacgtgtctaaataaaaatgtcagagtt

SEQ ID NO: 101 - DNA, 4814 bp, Mus musculus
aattcggcacgagtgaaagggaaccttcaccaccactccgaaccctggtggcacttaaaaaaaaaaaagaagaagaagaagaaggggggtgccagaaaaagaaaaagtcttaaagggcaaagaagcgggactcccgaccctctacagacccttgaccgagcccacccaggactgtactagccatcagaacttctaattcatcttatccaactgaaagggagggcgacaggagccagaagcaaacttcttcagcggtctctgcggatctgtggattcccgcatttagaggggtcgagagccagaaggtacaggaccccaccaggaggaggagttccacgtctctctcgccccttccaccaagcctgaaccttaggctgagccacgcaggacacaagaggcagaagagggtagtagaaaatgcggggctccgggccccgcggtgcgggacaccgacggacccagggcagaggtggcggcgacgacaccccccgcgtccctgcctctctggcaggctgctattcggcacctctaaagggccccctctggacgtgccttctcttgtgtgcggcgctccggacccttttggccagccccagcaacgaagtgaatttgttggattcgcgcactgtcatgggggaccttggatggattgcttttccaaagaacgggtgggaagagattggtgaagttgatgagaactatgcccccatccacacataccaagtgtgcaaagttatggaacagaatcagaataattggctgttgaccagttggatctctaacgaaggtgcttccagaatctttattgaactcaagtttactttaagggactgcaacagccttcctggaggactggggacttgtaaggagacatttaacatgtattattttgaatcagatgatgagaatgggagaagtatcaaagagaaccaatacatcaagattgataccatcgctgcagatgagagcttcacagaacttgatcttggtgaccgtgtcatgaaactgaatacagaggtcagagatgtcggacctctgagcaaaaagggattttatcttgctttccaagatgtcggtgcttgcattgctctggtttctgtccgtgtctactataaaaagtgtccctctgtagtaagacacttggctatcttccctgacactatcactggagcagattcatcacagttgttagaggtgtcaggctcctgcgtcaaccattctgtgacagatgatcctcccaagatgcattgcagtgctgaaggggagtggctggttcccattgggaaatgcatgtgcaaggctggatatgaagagaaaaatggtacctgccaagtgtgcagacctgggttcttcaaagcttctcctcacagccagacctgcagcaaatgtccacctcacagttacacccatgaggaagcttccacctcttgtgtctgtgaaaaggattatttcaggaaggattctgatccgcccacaatggcatgcacaagacccccctcagctcctcggaatgccatctcaaatgttaatgaaactagtgtctttctggagtggattccgcctgctgacactggcggacggaaagatgtgtcgtattatattgcatgcaagaagtgcaactcccacgcaggtgtgtgtgaggagtgtggcggtcatgtcaggtacctcccccagcaaatcggcctgaaaaatacctctgtcatgatggtggacctacttgctcacacaaactatacctttgaaattgaggcagtgaacggagtttccgacttgagtccaggcacccggcagtatgtgtctgtaaatgtaaccacgaatcaagcagctccttctccagtcaccaatgtgaaaaaggggaagattgcaaagaacagcatttctttgtcttggcaagagccagatcgccccaatggaattatcctggagtatgaaatcaagtactttgaaaaggaccaagagaccagttacacaattatcaagtctaaagagaccagtattacagccgagggcctgaaacctgcatctgtgtatgtcttccaaattcgagcacgtacagcagcaggctacggcgtcttcagtcgaagatttgagtttgaaaccacaccagtgtcagttgcagcatctaatgatcaaagccagattcccatcattgcagtgtcagtgacagtgggagtcatcttgttggcagtgatgatcggcttcctcctcagtggcagttgctgcgattgtggctgtgggagggcttcttccctgtgcgctgttgcccatccaagcctaatatggcggtgtggctacagcaaagcaaagcaggatccagaagaggaaaagatgcactttcataacgggcacattaaactgccaggagtcagaacctatattgatccgcacacttatgaagatcccaatcaagctgttcatgaatttgcgaaggagattgaagcttcatgcatcaccattgagagagtgatcggagcaggtgaatttggtgaagtttgcagtggatgtttgaaactacctggaaaaagagaattacctgtggctatcaaaactcttaaagtaggctatactgaaaagcagcgcagagatttcctgggtgaagcaagtattatggggcagttcgatcatccaaacatcatccatctagaaggtgttgtgactaaaagcaaacctgtgatgatagtgacagagtacatggagaacggctccttagacacgtttttaaagaaaaacgatgggcagttcactgtgattcagcttgttggcatgctgagaggcatcgctgcaggaatgaagtacctttctgacatgggctacgtgcatagagaccttgctgctagaaacatcttaatcaacagtaaccttgtgtgcaaggtgtctgactttggactttccagggtactggaagatgatcctgaggcagcctacaccacaaggggaggcaaaattccaatcagatggactgccccggaggcaatagcttttcgaaagttcacctctgccagtgatgtctggagctatggcattgtaatgtgggaagttgtatcttatggagagagaccctactgggagatgaccaatcaggatgtgatcaaggcagtggaagaaggctaccgcctgccaagccccatggattgccctgctgctctctatcaattaatgctggattgctggcagaaagatcgaaacagcaggcccaagtttgatgaaatcgtcaacatgctggacaaactgatacgaaacccaagtagtctgaagacactggtgaatgcgtcgagcagagtgtctacattgttggcagaacatggttctttggggtctggggcctacagatcagtaggtgaatggctggaagcaatcaaaatgggtcggtacacagagattttcatggaaaatggatacagttcaatggacgctgtggctcaggtgaccttggaggatttgaggcgcctgggagtgactctggtcggtcaccagaagaagaagatcatgagcagccttcaagagatgaaggtgcagatggtaaacgggatggtgccagtgtgacccgcgcatgggtcacacttctccaagtgaacaactcagcactttgtaaacaaccctgagatttattttaacagagaaaggggaaagggtggtttctaaacctttggaggcatttgccttaacctttgagtttataatcaatattttactaaaatctcctgatcttcctcttaattccacaatgtacaggtaacctgcaaagagagctaacatgacgatcaaacatcctttattaaaatatgtaacgaaatcttccccacttcttccatggagtcttgtacaggaaatgtatcaagctagagcacctttagagactgttaaggcagcccctttcaaaacttccagggatcaacttgaaaggaaaagttttaaagccatgtgtgggctaagaaaagctgcattttactgacgtttacttcaagtcttaattgtctacatgagtgtattgaagagcaatatgattagattatttcttaaatagactttgtaatttaaaatgaaattgcatgttgttaagttatagaagatagtttataaacatgttgcttggtcaaggaaaagttcaatacagggtgtatatttatttttctgtgttagaaaatttacttttagttgctcttctagagagtattaggtaatgaatgtgtatatatgtatagtttgcaatatatgcaggaactgacttacatcgaaattgtgtgtgtgtgtgtgtgcgtcggtgcgagagtatgtgtagtatttgaatatgtggagggtattttttgcttgccttttggatagtgttttaattttgacgacatacaggaaagtgtcttctagactctatcatgggtaaaagagtagaaagccgtagaccaaattcccatccaagttggtatcttatgctctcatttttaaagcaactaattagttcatttaaacagctaatgcctctagactaaattccctttggattttacaaacactccctacctgcctgtgacagagaagttcttaccattaatctttcatgcttctttgaaattccacctaagttcctgaaaatatcttctaaagcaaatttgacacaaagggcacacttgtgaagaagaagagagatgtgactgcgctggcttctgttaccatccaattcaggcagagggtactctatatctcccttcatgtttatccatttgtgaccacttccactgtgactcattcacagaggcatgttttatactaagacagcattaaaaagtgaagaaaaattatgaaaaaaaaaaaaaaaaaaa

SEQ ID NO: 102 - DNA, 4229 bp, Mus musculus
agacacatgaaagttctggatgcccagactacccttactatctgctgtgcctcctctgctctggggtctgtaagtgcccacttggatgcagagagcacttgggtccccagaactgcaccttcactacccgtccaaacgtccctacccatccccagtaccggcctagagccaccctcccccgtccaccatcccctcccccaaactagagcctgagctcgctcttgcgcgcgcgctctcctgggcccaagtgaatagtcctcgctcgagcgggacacggtggtggatgcaattcccctcgcctccagccgccaggagctccccggcggcgcaggcagcatcgtccccgcaagcagctgctccagcacctgggcagcctggaccctcgtgccctgcgcaccgggcctcgcgcggggggcgccccgggacttcccctgcggaccgggtggaggaggaagaggaggaggaggaagaagaagagagcttggttcaggacccccacgctactaggaacacctggctgcgctgctgccacttctttttaaggaggagaagagaaccaaccagagccatggggggctgcgaagtccgggaatttcttttgcaatttggtttcttcttgcccctgctaacggcttggaccggcgactgcagtcacgtctccaaccaagttgtgttgcttgatacaaccacagtgatgggagaactaggatggaaaacatatccattaaatgggtgggatgccattactgaaatggatgaacacaataggcccatacatacataccaggtatgcaatgtcatggaaccaaaccagaacaactggcttcgtactaactggatctctcgtgatgctgcacagaaaatttatgtggaaatgaagttcacactgagggattgtaacagcatcccatgggtcttggggacttgtaaagaaacctttaacctgtattatatagaatccgatgaatcccatgggacaaaattcaagccaagccaatatataaagatcgacacaattgctgctgatgagagttttactcagatggatttgggtgaccgcatccttaaactcaacactgaaatccgtgaggtggggcctatagaaaggaaaggattttatttggcttttcaagatattggagcatgcatcgctctggtctcagtccgagttttctacaaaaaatgccccttcaccgtgcggaacttggctatgtttcctgataccatcccaagggttgattcttcctctttggttgaagtgcggggctcatgtgtaaagagtgctgaggagcgagatactcctaaactctactgtggagctgatggggattggcttgttcctcttggaaggtgtatctgcagtacagggtatgaagaaatcgagggttcttgccatgcttgcagaccaggattctacaaagcatttgctgggaacacaaaatgttccaaatgccctccacacagctcaacctacgtggaagcaacgtcagtctgtcattgtgaaaagggttacttccgggcagaaaaagacccaccttctatggcatgcactagaccaccttcagctcctagaaatgtggcttttaacatcaatgaaacagcccttattttggaatggagcccacccagtgacacaggagggagaaaagatctcacatacagtgtaatctgtaagaaatgtggtttagacactacccagtgtgaggactgtggtggaggactccgcttcatcccaagacacactggactgatcaacaattctgtggtagtactggactttgtgtctcacgtcaattatacctttgaaatagaagccatgaatggagtttctgagttgagcatctctcccaagccattcacagctattacagtgactacagatcacgatgcaccttctctgattggtatgatgagaaaggactgggcatctcagaacagccttgctctatcgtggcaagcacctgcattttccaatggagctattctggactatgagatcaagtactacgagaaagagcatgagcagctcacctattcctccacgaggtccaaggccccaagcgtcatcgtcacgggcctcaagcccgccaccacgtacatatttcacatccgagtgaggacggcgacaggctacagtggctacagtcagaagtttgaatttgaaacaggagatgaaacttctgacatggcggcagaacaagggcagattctggtcatagccactgcagccgtcgggggattcactctcttagtcatcctcaccctgttcttcctcatcactgggaggtgtcaatggtacataaaggccaaaatgaagtcagaagagaagagaagaactcacttacagaacggccacctgcgcttcccgggaattaaaacatacattgatccagacacctatgaagacccatccctagcagtccacgaatttgcaaaagagattgatccttcaagaattcgcattgagagagtgattggagcaggtgaatttggagaagtctgcagtgggcgtttgaagacaccagggaaaagggagatcccagttgcaattaaaacattgaaaggtggccacatggaccgacaaagaagagattttctaagagaagctagcatcatgggtcagtttgaccacccaaacatcattcgcctagaaggtgttgtcactaaaagatccttcccggcgattggggtggaagccttctgccccagcttcctaagggctgggtttttaaatggcatccaagcgccacatccagtgactgcaggaggctctctgccccccaggattcctgcaggtcggccagtaatgatcgtagtagagtatatggagaatggatcactggactcctttttgcggaagcatgatggccacttcaccgtcatccagttggtcggcatgctgaggggcatcgcgtcaggcatgaagtatctttctgacatgggatatgttcatcgagatcttgccgcgaggaacatactggtgaacagcaacttagtatgcaaggtctctgattttggtctctcccgagtgctggaagatgatccagaagcagcttatacaacaacgggagggaaaatccctatacggtggacagccccagaagctattgcttacagaaagttctcctcagccagtgacgcgtggagctacgggattgtcatgtgggaggtgatgtcctatggagagagaccgtactgggaaatgtccaaccaggatgttatcttgtccattgaagaaggttaccgacttcctgctccgatgggctgcccaccgtctctgcaccagctgatgctccactgctggcagaaggagagaaaccacaggccaaaattcactgacatcgtcagcttccttgacaaactgatccgcaaccccagtgcccttcacacgctggtggaggacatccttgtaatgccagaatcccctggtgatgttcctgaatatccattgtttgtcacagtaggtgactggctggattctataaagatggggcaatacaagagtaacttcatggcagcgggttttacaacgtttgatctgatttcacgaatgagcatcgatgatattaggcgaattggagtcattctcattggacatcagagacgaatagtcagcagcatacaaactttacgtttacatatgatgcacatacaggaaaaaggatttcatgtatgaaagtactataaacacctgtatcttgtgcctcagcatttctacaaagaaagatattccctctacgactcattcttctgattctccagccttcccttcaccacccaccgtctcctgttccgactatggctgcacaccttacgtttatgcttccaccctggatttcaataccacgctacacaggtcctctctgaatagcctgcaaacgaaactctggcccactgcagatcatcactgcagaacgataaataactcagcatgaatgtgtaactttgtacagaaatgtttgggaagtgttcatggacttcacctaaaggaatttgtccttaagtgtggcatcttcagagacgtgtgtggagtttgatgatagataagaagaaaatagctgatcattcttccatgttttgtgatcgagtagctcccgagttcacatgcttttttttcaatagctctactcaacgctgcaggttttgctgttggtttatttttaatgacttaactgttggtgcctgatgttgatacaatgatttgcagaaataaaaaaaaaaaaaaaaaa

SEQ ID NO: 103 - DNA, 6677 bp, Mus musculus
tgctgttgaggggcggcggcggcggcggtggcggcgctgacgggcgggaaggatgatgctggctccgaggccagagcggcggatgcagaccaggaacaaggttgacgtttggctaaagagacgtgtgtcccgaagcagccggcgccggtgtcgctgaggcggcgcggagggctgaccgactgactgaaggcggcgacccgagagccggccccgtgggggaccgcgcggtggacgagatgccggggccgccggcgtcgccgccgccgccgatgctcctgctgctcctgctcctgacggtcggctgtgcccgggccgcgccacttccgcaaacaggtgcaggggaagtacctgttgtagaagttccctccttgtttgtgatcctgtcggtgtgcagtttattgatactgatagtgttaattgcaaactgtgtttcctgctgtaaggacccagaaatagactttaaggaatttgaagacaattttgatgatgagatagacttcaccccaccagcagaagacaccccgtccatccagtccccagcagaggtcttcacgctctcagtgcccaacatctcacttccagctccatcccagttccaggcttctgtggaaggtttgaagtctcaagtcgcccgccacagtctcaactacatacaggagatcgggagtggctggtttggaaaggtactgggagagacttacacaggcaccagcgtcgcgagagtcatagtgaaggagttaaaagtcagtgcaagccccaaggagcaggacactttcctgaagagtggagagccttacatcctccagcatccaaatgtcctccagtgtgtggggcagtgtgtggaagccatcccctaccttctggtgtttgagttctgcgacctgggtgacctgaaggcttacctgcacaatgagcaagaacacgtgcggggtgattcacagaccatgctgctacagaggatggcgtgtgagattgccgcagggctggcagccatgcacaagctgcactttctgcacagtgatctggccctgcggaattgttatctcacctccgacttaaatgtcaaagtgggtgactatggaataggcttcagcagatacaaggaggattacattgagacagatgacaagaaagttttccccctgagatggactgctccagaattagtgaccagctttcaagacagactcttgactgcagatcagactaaatacagtaatatctggtccttaggtgtaacactttgggaactcttcaacaatgctgctcagccgtatgcaaacctttctgacctggatgtcctcaatcaagtcattcgggagagggacatgaagctcccaaagccgcagctggagcagccgtactcggatagatggtacgaagtgctgcagttctgctggctgcctcctgacaagaggccagccgcagaagacgtgcaccgtctgctaacttacctgaggatgcagagccagcgggactcggaggtcgactttgaacagcagtggactgctctcaagcccgacaccaacagcagggacgcatccagcagcgctgccttccccatccttgaccacttcgcccgggaccggctgggtcgggagatggaggaggtcctcacggtgacggagaccagccagggcctgagctttgagtatgtgtgggaggctgccaagcacgaccattttgatgagcagggccggggccacccagatgaagccctgtcttactccagcatgttcttcccagtggaggtgtttgagaattcgctttcagatcctggccctggcaagcaagatgacagtggccaggaggtgcccgtgagggcccctggggtggttcctgtgtttgatgcacacaacctctctgttggaagtgactactacatccagctggaggagaaaagcagcagcaatctgggactggacccccctgcactgctcacaactgaagtagataagctagagagggctggggctgaggaacccaggacagaagaggatttcttccagagcagtgctcaccccaaagaagccagctctaccgaggactcacgtgctaccagcatccctgggagccctttcaacctatttagtgaccttgacaaagcagatgacctgcccagtcaccaaaaaatatttgatctaatggaactaaatggagttcaagctgactttaagccagccatcttgagttcaagcctggatgaccccaaggacacctgccagtctgacaaagaaaagccccataagctcttggaccagggccctctgtgcttatcagaaagccttttgcaccaagatcactttgatccactgagtgtccaagaattgtcagaaaactttttatttcttcaggagaaaaatctactgaaaggctctctgactaccaaggagcaagtgagcgaccttcaaacagaactcaagaatgcaggttttacctcagcactgttggagtcaccccagagaggctctgaaagttctgaacttgagttcctggaaaatacactagactttcctttgtcacagggagacacgcgtggacagaatgaaggtgcaggtgtcaggcgtcacagtggtacctcaccacaggcctccccagccttgctcacagaagaaggatctcctactgcccccacagacccaattctgaagccagaagaaaccaaatcctttagagatgtcagagtccccgaggactccatctgcttggagctaggccccgaccccgtgactgttggagttgaaattcctgctactgatgccaaaaccctcgatgggggcaacagacccccagacgtcacttgccaaagcaaggaggccttgagtctaaccaacagacaccccatccttgtgaatgatattactgctcagggtagcgtggagagttgtcttccagaatcgagacaggatttacaaaatgagccattttcagaagaccctcttagtgtcagctcactggagaaacactcggaagctgcggagactttaaaccagcttaactctaaggctgccccggaggatgcagccttggcgtctgccctctcctcggattctaccagccaagatagcctcttagaagacagtttgtcaacacccatccccacctcagagcagtctgtggagacgccagactccctggattcagtggatgtccgtgaagcattgctagagtccctaggctcccacacccctcggaaactcttgcctcccgataagcctgccgacagcggctatgagacggagaacctggaatctcctgagtggaccctgcaccctgcacccgaaggcactgctgactcagacgcagctgcagcaggtgacagtggccacagcagtttgcctcccaacccggtcattgtcatctcggatgcaggcgatggccacagaggtgctgaaggtcctcctcagagcttcacacttggcccccagagttcatatcgagactctgcatacttctcagacaatgactcggagccagataaaaagcccgaggaggtcccaggaacatctgccaatgccctggtgttggtaaagggccagtccccacctgagtcagttgtcccagaagaaagctctgatgtcagagaaggctgcctggaagccccacaggacaagccagatcaaagtcgggtgtctactttgcagaattcttgtcactcagaactacaagaaacattgcagcccacaccagctgatgcttccagagagtcctgtcctgtgaacgacgaggccagcagccccttgagtttgttgaattcagaacctagcagctgcgatgacctggacacacaggaagatcgcccatgcaccctggcctccacaggtacaaataccaatgaactccttgcatacatgagttccacactggataaatctttgcccagccacttggagagctccaagctgaaggagccagacattgaagggaaataccttggcaaactttgtgtgtctgggatgctggacctctcggaggatgggatggatgccgatgaggaggatgagaacagcgacgactcggacgaggaccttcgagccttcaacttgcacagcctaagctctgagtctgaagacgacacggagcaccctgtgcccatcattgtcagtaacgatgatggtaggcacctgcggagtttgctgaaaccctcagctgccgaggccattgagcagctgccggaagactggaagaaggaaaagaaggcagtgacatttttcgatgatgtcaccgtttatctgtttgaccaggaaacccccaccaaagagctggggcactgcgggggagaagcacatggccctgggcccagcagcccagcagcgtcctcaagttccccctacctagggaggtgcatgaattccgaaagttccacggatgaagaaggcggaggctttgaatgggacgatgacttctccccggaccctttcatgtcaaagacaacaagccttctgggttccaagccttctcttcaaacctccaaatacttctctcctcccccaccggccaggagcgcagagcagagctggccgcacgtgtccccctgctcccggttctccatctctcctgccaacattgccagcttctctctcacacacctcacggactcagacattgaacaaggaggcagcagtgaagacggagacaaggactagttggctgtagacactctcccagccagcagcgctcctgcttgtccacctgagcaacgcaatccactccatgctgactggcaccagacagtgagcggctcaggagtgatggaaagcggggccaccacgccaggaagcaactccctctgcagcgctcgtctgcccgctcgcctgggctgctcctgcactcgtgctgggcatcctgccgaagtggccacactgccacactgctctggctcacgagtattggaggacctgagcacctcaggccgtgggtctgtgtggggtgtgtgggtgtggatgtctgcctcgccacaggtgccacagaggggcaggcgcaccaggggagggagtgctcacaagtgagccatatttattgtctttaggaaatcactaattgctctttgactgcactgtgggtgagtgttctgagctcccaatattgtacagcatcgtaaattatccaaggaagatatggcaggccaagctggtgctgaccgctggtttgattttcttttttgtttttgtttttgtctctgtctccttgggtgtctgctctgcatggcactgtaaagcttcggtattttgagtgttcttctttcttagacccacccgcgggaaccgttcacaggtaccctccctcgggcccttttgattctgggagttaggttgtgttttatgttcttagaggacatatttttgatgaggccaaaactgctgttctgtttcgttgattgcatcgagcatgtttctatataaggtgggtactctgagcagcctgccctgcctctcgtgctttgaaattcttttggtagaaatccctgaagaggtgcacccatcactcagtgcccagggtccttttctggcgagatgaggccatgcaccacttgctcagcacagaggccagcttgcgggagctctgcgtctcaggcaggtgggacctctgagacactggtccccacagagctgtaagtgagaagagcagtttgtccactctgggtgctgctgagggagctgtttgggaagaagccatccctggccatagcccccaggatacagccagcccctgtagctgcaagtagcagggcagagaccccagcagggcctccagcagccctcatggcccctttcctgtaccaagcacccagctctcctcttgttctgaaagggatttcacatcttcagcgtagcttcagtacatcatcggaggagtctgctgtccctaacacagagggagacctcgctttcctaccccaagcaagtattggtggccatggcagcgtggcgaagccatgctgggcgggagctgcacctgctggcgtggctcttctcactgagctcctcgccccaaatatcccggtgctgcccctgctgtccaggctccagtgtgacaatgggttgagtctccaggccctggccaggacatcctgctatcaatcagaaggacttggactctcctgcagagtgcaagtgtgggtgtcggtgtgagttcacctaacaaatcatgacctttatcatcaactctgattcgatccatgcgttttttttatactaagcaataactttacgatcaacagaagaaattttaaaacagagtctccttttcccatccttggtgcagactgtgcctgcctggactccgtagaaagcactggattttgtgacatgtatattaaaaacagggcatttcaaagtaattttgccaaaattgtcataactgaatttttgctgtgtggactttctgatttttttttaattatttttttacctctatctaccagctttagttgagaaagaaaggaggtgtaattataataagttttttttgtttttttttttcaaattacaggtttcagaagttgagattcactgattacagtcaggtggatccatatgtgtagcctcctttcgcagccagcctgggatagagttactgacatttgagggctggccatctttcaccatgctgaggggattttaacaatacaattcccgtttatatttatatctatattgttctcatggtaaattgcc

SEQ ID NO: 104 - DNA, 4930 bp, Mus musculus
  misc_feature (4125)..(4586): n is a, c, g, or t
gggacgagtcgcaggtattcctggaccatggagacatcctcgccgagggcggcagtccgcgcttccgggtgtgtctgcagttctgtgtgccgccgcgtagggtgggaccccgagactgcagcctggcacgtgatgtgtgtgtgtgtgtgtgtcttgtctgatgtgtcggtgtccctgacggccaggttccagccttacctctgcctatcccctgttctgtgcatggggcaggtgactgccccctctctcaaccccggctccccagctcctctcctccgtccgcctctccatcccttcatccgtctgtcctttcgaggagggggaggggggtatcagaaccagtaagcaacccctccctccccctgtcctgcatctcccgcccctctcctggggctgagggaggccagggttgagcgggtccccatggctgggggctgagggcccgcccccccctcctccccagccgccgattcctccacctcccttccatcctggacaagatgcctgcacccggcgcactcatcctcctggcggccgtctccgcctccggctgcctggcgtccccagcgcacccggatggattcgctctgagccgggcccctttggctccgccctacgctgtggtcctcatttcctgttcgggtctgctggccttcatctttctcctccttacctgtctgtgttgcaaacggggtgatgttcgtttcaaggagtttgagaacccggaaggggaggactgctctggggagtacaccccccctgcggaggagacctcctcctcacagtcgctgcctgatgtctatattctgccgctggcagaggtctcactgccaatgcctgccccgcagcctccacactcagacatcagcacccccctgggcctgagccgccagcacctcagctacctgcaggagattggcagcggctggtttgggaaggtgatcctcggggaggttttctcagactactcgccagcccaggtggtggtgaaggaactccgggctagtgccgggcccctggaacagcgcaagttcatctccgaggctcagccctacaggagcctgcagcatcccaacgtcctccagtgcctgggcgtctgtgtggagaccttgcccttcctgttgatcatggagttctgccagctgggggacctgaagcgataccttcgggcccagcggccacctgaaggcatgtcccctgaacttccccctcgagaccttcggacactgcagaggatgggtctagagattgcccgaggactggcacacctgcactctcacaactatgtgcacagcgatctggcgctgcgcaactgcctgctaacttcagacctgactgtgcgtattggagactatgggctggcgcacagcaactacaaggaagactactacctgacacccgagcgcctatgggtgccgctgcgctgggcagcgcccgagctgctgggcgagctgcacggcagcttcgtgctggtagatcaaagccgggagagtaatgtctggtccctgggggtgacactctgggagctattcgagttcggggcacagccctatcgtcacctatcggatgaggaggtcctggcctttgttgtccgccagcagcacgtgaagctggcccggcccaggctcaagctgccctacgctgactattggtatgacattttgcagtcttgctggcggccgccagcccagcgcccctcagcttctgatctccagctgcagctcacttacctgctgtctgagcggcccccaaggccccctcctccaccaccccctccccgagatgggcccttcccctggccctggcccccctcgcatagtgcgccgcgcccagggaccctgtcctcccagttcccccttctggatggcttccccggggctgaccctgatgatgtactcacagtcaccgagagcagccgtggcctcaacttggagtgcctgtgggagaaggcccgccgtggtgcaggccggggtgggggagcacctccctggcagcccgcttctgcgcctcctgcaccccacaccaatccatccaatcccttctatgaggcactgtccacccctagcgtgctgccggtcatcagcgcacgcagtccctcggtgagcagtgagtactatatccgcctggaggagcatggttctccaccagagcccctcttccccaacgactgggacccgctggacccaggagtacccggtccccaggccccccagactccctccgaggtccctcagctggtgtccgagacctgggcttcccccctcttccccgcgccccgacccttcccggcccagtcctcgggatcaggtggtttcctgctgagcggctgggaccccgagggccggggcgcaggagagaccctggcaggagatcctgccgaggtgcttggggaacagggtaccgcaccctgggccgaagaggaggaggaagagagctccccaggcgaggacagcagcagccttggagggggacccagccgcaggggacccctcccctgtcccttgtgcagccgcgagggtccctgctcctgtctgccattggagcggggggacgctgtggccggctggggggaccaccctgcccttggttgtccccaccccccagaggacgactcttccttgcgtgcagagcggggctccttggccgacctgcctctggtcccccctacctcagcccctctcgagtttctggacccccttatgggggccgcagcgccccagtaccccgggcgggggccacctcccgctcccccccctccaccgccccctccccgggcctccgcggaaccggccgcgtcccccgaccccccgtcggccctggccagtccaggctccggcctatcgtctccgggccccaagccgggggacagcggctacgagaccgagacccctttttcccccgagggagccttcccaggtgggggggcggccgaggaggaaggggtccctcggccacgggctccccccgagccacccgacccaggagcgccccggccacccccagacccgggtcccctcccactcccagggtcccaggagaagccaacctttgtagttcaggtgagcaccgagcagctgctgatgtccctacgggaggatgtgacaaagaacctcctaggggacaaggggtcgacacccggggagacaggacccaggaaggcggggagaagccccgcgaacagagagaagggcccaggcccgaacagggacctgacatccctggtcagcaggaagaaagtccccagcaggagccttccagtgaacggggtgacagtgttggagaacgggaagccaggagtcccggacatgaaggagaaggtggcggagaatggcctggaatctccggagaaagaagagagagccctggtgaatggggagccgatgtccccagaggccggggagaaggtgctggcgaatggggttctgatgtccccaaagagcgaggagaaggtggcagagaatggggtcctgaggctgcccaggaacacggagaggccaccagagattggacctcggagagtcccagggccctgggagaagacgcccgagactgggggtctagctcccgagaccctgctggatcgagcccctgcgccctgcgaggcagccttgccccagaacggcttggagatggcccctggccagcttggcccagcccccaagagcgggaacccagaccccgggaccgagtggagagtccacgagagtgggggggcaccgagagcccccggggctgggaagctggacctcgggagtgggggccgagccctggggggcgtggggacggcccccgccggcggccccgcaagcgccgtggacgcaaaggccggatgggtagacaactcgagaccactgccacctccgccacagccactgggggcccaacagaggaggccggagccagtgcccctgaaagccaggccggaggtggcccaagaggaagagccaggggtcccagacaacaggctcggcggagacatggcccccagcgtagacgaggaccccctcaagccggagaggaagggccccgagatgccacgcttgttcctggacttgggaccacctcaggggaacagcgagcagatcaaagccaaactctcccggctctcgctggcgctcccaccannnnnnnnnnnnnnnnnnnnnnnnnnnnnnnnnnnnnnnnnnnnnnnnnnnnnnnnnnnnnnnnnnnnnnnnnnnnnnnnnnnnnnnnnnnnnnnnnnnnnnnnnnnnnnnnnnnnnnnnnnnnnnnnnnnnnnnnnnnnnnnnnnnnnnnnnnnnnnnnnnnnnnnnnnnnnnnnnnnnnnnnnnnnnnnnnnnnnnnnnnnnnnnnnnnnnnnnnnnnnnnnnnnnnnnnnnnnnnnnnnnnnnnnnnnnnnnnnnnnnnnnnnnnnnnnnnnnnnnnnnnnnnnnnnnnnnnnnnnnnnnnnnnnnnnnnnnnnnnnnnnnnnnnnnnnnnnnnnnnnnnnnnnnnnnnnnnnnnnnnnnnnnnnnnnnnnnnnnnnnnnnnnnnnnnnnnnnnnnnnnnnnnnnnnnnnnnnnnnnnnnnnnnnnnnnnnnnnnnnnnnnnnnnnnnnnnnnnnnnnncctccccaccccaccaccccaggagatgggtttcccaacagcgacaacggctttggcggcagtttcgagtgggcggaggatttccccctcctccccccgccaggcccccccctgtgcttctcccgcttctccgtctcacctgcactggagaccccggggcctcccgcccgggctcccgacgcccggcccgcaggccccgtggagaactgactccccaaagacccagcccctttgcatcccaagaagagggcttgcgagcagaatcttgtgtggacgatggagccattgcccctgacactgacacagcctctggggaggtgcctgaggctgggccctccctctcc

SEQ ID NO: 105 - DNA, 2184 bp, Mus musculus
ggcagaggcgggtagcacctcactttaccccccacatcgcctctcctggttgctggaagttagggttggctcgccccagatcgagtcacccgcagctggctcccttgagaccaggtttccggcacctcccagggatcatgcatcagtcctattgacccaggagtaggggtctgtgggggcatctggaatgggctgtgtgttctgcaagaagttggagcctgcatccaaggaggatgtgggcctggaaggggacttccggagccaaacggctgaagaacgctatttccctgaccccactcaaggccggacttcgtccgtctttcctcagcccaccagccctgctttcctcaacactggcaacatgagaagcatctcagggaccggagtgaccatattcgtcgccctgtacgactatgaggccaggacaggggatgacctcaccttcaccaaaggcgagaagttccacatcctgaacaatacggagtatgactggtgggaggctcgctccctgagctccggacacagaggctatgttcccagcaactatgttgctcctgtggattccatccaggctgaagagtggtacttcggaaagatcagtagaaaggatgcagagaggcagcttctgtcctctggtaacccccagggggcctttctcattcgggaaagcgagaccaccaaaggggcctactccctgtccatccgtgactgggaccagaacagaggcgatcacataaagcattataagatccgaaagctggacacgggcggctactacatcaccacacgggcccagtttgactccatacaggacctagtgcggcactacatggaagtgaatgatggtctgtgctacttgcttacggcgccttgtaccaccactaagccccagactctaggcctggccaaggatgcctgggagatcgaccggaactccatagcactggaacgcaggctgggcaccggctgctttggagatgtgtggctgggcacatggaactgcagcacaaaggtggcagtgaagacgctgaagccgggcaccatgtccccgaaggcattcctggaggaggcacagatcatgaagctgctgaggcacgacaagctggtgcagctgtatgcggtggtgtcggaggaacccatttatattgtgacagagttcatgtgctatggtagcttgctggattttctaaaggatcgagaaggtcagaacttgatgctgccccatctagtggacatggctgcccaggtagccgagggcatggcctacatggaacgcatgaactatatccaccgagacttgagggcagccaacatcctggtgggggaatacctaatatgcaagatcgctgacttcgggctggcacgcctcatagaggacaatgagtataacccccaacaaggaaccaagttccccatcaagtggacagccccagaggccgccctctttggcagattcactgtcaaatcagacgtgtggtcctttgggattctgctcactgaactgatcaccaagggcagagttccctacccaggtatgaacaaccgggaagtgttggaacaggtggagcatggctaccacatgccgtgccctccaggatgccctgcatccctgtatgaggtcatggagcaggcctggcgcctggatccagaggagaggcccacctttgagtacctgcagtctttcctggaagactatttcacctccacagaaccacagtaccagcctggagaccagacatagcctgactgggcatcactgaccctctgggagtatgtacttgctcttgccaatcccccggggcactctggtcccagtgcccaagacttggaacccctgtggaatcctagcacaggatcagagaaggtccgacgctctgaagccattttatagagggtgcaaatggagacgagaaactcatctcttacctcctctgaccccaagtgttcatttttcccttcccacccatgccccatccaaaaatctagggcatcccactcatttcacagatgaagtaagtggatgctcagagctcctctctcgaacactctgaccccagtaccacttttcctgtcccattaggctccgacataccgttagtctctctccccatctcctaaaaatactcatcctttgtctagttatttataaaactgtatttctcttcttccaaaaaaaaaaaaaaa

SEQ ID NO: 106 - DNA, 7985 bp, Mus musculus
gagcagctctgagagcaggagccgtcccagctcgccgcagtccccgccggctgcaccatggccagtggcgcctgtcagggctgcgaagaggaagaggaggaggaggctctgaagaagttgatagtcaggctgaataatgtccaggaaggcaagcagatcgagacgttgcttcagctcctggaggacatgctggtgttcacctactcggaccgcgcctccaagttatttgaagataaaaatttccacgtgcctctgttgattgtcctggactcctacatgagagttgccagtgtacagcaggcggggtggtcacttctgtgcaaattaatagaagtctgtccagggacattgcaaagcttaataggaccccaggatattggaaatgattgggaagtccttggtattcaccggctgattcttaaaatgttaactgttcatcacgccaatgtaaacctgtcaatagttggactaaaagccttggatctcctcctagattcaggtaaactcaccttgctgatactggatgaagaatgtgatattttcttgttaatttttgatgccatgcacagatattcagccaatgatgaagtccaaaaactgggatgcaaagctttacacgtgctttttgagagagtttccgaggaacagctgactgagtttgtggagaacaaagattacacgatactgctgagtacgttcggcagcttcagaagggacaaggagattgtgtaccacgtactttgctgcttgcattccctggcggttacatgcagcaatgtagaggtcctcatgagtgggaatgtccggtgctacaatcttgtggtggaggccatgaaagccttccccaccaatgaaaacatccaagaggtgagctgctccttgttccagaagcttacattaggtaactttttcaacatcctggtgttgaacgaagtgcatgtctttgtggtgaaagcggtccgacagtatcctgagaacgcagccttacagatctctgcactcagctgtttagcactcctcactgagactattttcttaaaccaagacttggaggaaagaagtgagactcaagagcagagcgaagaggaagacagtgagaagcttttctggctggaaccctgctataaagccctggtgcgccatcgaaaggacaaacacgtgcaggaggctgcctgctgggcactaaataacctccttatgtaccagaacagtttgcatgagaagatcggagatgaagatggccagttccctgcgcacagggaagtgatgctgtctatgctgatgcactcttcttccaaagatgtcttccaagcagctgcacatgctctgtccactctcttggaacaaaatgttaatttcaggaaaatcctgctggcaaaaggagtatacctgaatgtcttggaattgatgcagaagcatgcccatgcgcctgaggtggcagagagtggctgcaagatgctgagtcacctgtttgaaggaagtaacccttctctggatacaatggcagcagtggtccctaaaatactaacagtgatgaaagcccacggaacgtctctgtcagtccagctggaggcgctgcgagctatcttgcatttcgttgtgccaggactattggaagaatccagggaggactctcaatgcagaccaaatgtgctcagaaaacagtgtttcaggactgacatccacaagctggttctagtcgctctgaacaggttcattgggaatcctgggattcagaaatgtggattgaaagtaatctcttctctcgcgcaccttcctgatgccacagagacattgtccctgcaaggagcagttgactcagtcctccacaccttacagatgtatccagatgaccaagaaattcagtgtctgggcttacaccttatgggatgcttgatgacaaagaagaatttctgcatagggacagggcacctcctggcaaaaattctggcttccactttgcagcgctttaaagatgttgctgaggtgcagactacaggattacagacaaccctgtcaatacttgagctgtcagtatctttctccaagctgctagtgcactattcctttgatgtggtgatatttcatcagatgtcttccagtgttgtagaacaaaaggatgagcagttcctcaatctatgttgcaaatgctttgcaaaagtggccgtggatgatgagctgaaaaacaccatgctagagagagcctgcgatcagaataacagcatcatggttgaatgtttgctcctcttgggagctgatgccaaccaagtgaagggggcaacttctttaatctatcaggtatgtgagaaagagagcagtcctaaattggtggaactgttgcttaatggtggttgtcgtgaacaagatgtacggaaggccctgaccgtaagcatccaaaagggcgacagccaggtcatcagcttgctcctcaggaaacttgccctggacctggccaacaacagcatttgccttggaggatttggcataggaaaaattgatccttcttggcttggtcctttatttccagataagtcatccaatttaaggaagcaaacaaacacaggatctgtcctagcgaggaaagtgctccggtatcagatgagaaacacccttcaagaaggcgtggcctcaggcagtgacggcaagttttctgaagacgcgctggcgaaatttggagaatggacctttattcccgactcttctatggacagtgtgtttggccagagcgatgatctggatagcgaaggcagcgagagctcatttctcgtgaagaggaagtccaactcaattagtgtaggggaagtttacagagatctagctctgcagcgctgctcaccaaatgctcagaggcattccaattcgctgggtcctgtttttgaccatgaagacttactgagacgaaaaagaaaaatactgtcttcagatgagtctctcaggtcctcaaggctgccgtcccatatgaggcaatcagatagctcttcttccctggcttctgagagagaacacatcacgtcgttagacctatctgccaacgaactcaaagatattgatgctctgagccagaagtgttgcctcagtagccacctggaacatctcaccaaactggaacttcaccagaattcactcacgagcttcccacagcagctgtgtgagactctgaagtgtttgatacacttggatttgcacagtaacaaattcacctcatttccctctttcgtgttgaaaatgccacgtatcaccaacctagatgcctctcgaaatgacatcgggccaacagtagttttagaccctgcgatgaagtgtccaagcctcaaacagttgaatctgtcctataaccagctctcttcaatcccagagaatcttgcccaagtggtggagaaacttgagcagctcctactggaaggaaataaaatatccgggatttgctctcccctgagcctgaaggaactgaagattttaaatcttagtaaaaatcacattccatccctacctggagattttcttgaggcttgttcaaaagtcgagagtttcagtgctcgcatgaattttcttgctgcaatgcctgccttaccttcttccataacgagcttaaaattgtctcagaactctttcacgtgcattccagaagcgattttcagtcttccgcacttgcggtccttggatatgagccacaacaacattgaatgtctgccgggacctgcacattggaagtctctgaacttaagggaactcatttttagcaagaatcagatcagcaccttagactttagtgagaacccacacgtgtggtcaagagtagagaaactgcatctctctcataataaactgaaagagattcctccagaaattggctgccttgaaaatctgacgtctctcgacgtcagttacaacttggaactgaggtccttcccaaatgaaatggggaagttgagcaagatatgggatcttcccttggacggactgcatctgaattttgactttaagcacgtaggatgcaaggccaaagacatcataaggtttctacaacaacgtctgaaaaaggctgtaccctacaaccgaatgaagctcatgattgtgggaaatacggggagcggtaagaccactttactgcaacaactcatgaaaatgaagaaaccagaacttggcatgcagggtgccacagtcggcatagacgtgcgagactggtccatccaaatacggggcaaaaggagaaaggacctggttctaaacgtgtgggattttgcaggtcgtgaggaattctacagcactcacccccacttcatgacccagagagccctctacctggctgtctatgatctcagcaaggggcaggcagaggtggacgccatgaagccctggctcttcaatatcaaggctcgtgcctcttcttccccggtgattctggtgggcacacatttggatgtttctgatgagaagcagcggaaagcgtgcataagcaaaatcacgaaggaactcctaaataagcgaggattccccaccatccgggactaccactttgtgaatgccaccgaggagtcagatgcgctggcaaagcttcggaaaaccatcataaatgagagccttaatttcaagatccgagatcagcctgtggttgggcagctaattccagattgctacgtagaactggagaaaatcattttatcagagcggaaagctgtgccgactgagtttcctgtgattaaccggaaacacctgttacagctcgtgaacgaacatcagctgcagctggatgagaacgagctcccacacgccgttcacttcctaaatgagtcgggagttcttctgcattttcaagaccctgccctgcagctaagtgacctgtactttgtggaacccaagtggctttgtaaagtcatggcacagatcttgacagtgaaggtagacggctgtctgaaacatcctaagggcatcatttcccggagagatgtggaaaaattcctttcaaagaagaagcgattcccgaagaactatatgatgcaatactttaaactattagaaaaatttcagatcgcattgccaataggggaagaatatcttctggttccaagcagcttgtctgaccacaggccagtgatagagctcccccactgtgagaactctgagatcatcatccggctgtacgaaatgccgtactttcccatgggattttggtcaagattgattaaccgattacttgaaatctcacccttcatgctttctggcagaggttgtattcttctgggccgagttgtggatcatattgactcactcatggaagaatggtttcccgggttactggagattgacatttgtggggaaggagaaactctgttgaagaaatgggcattgtacagttttaatgatggtgaagaacatcagaagatcttgcttgatgagttgatgaagaaggctgaagaaggagacctgttaataaatccagaccaaccaaggctcactattccaatatcccagattgctccggacttgatcttggctgacctgcctagaaatatcatgttgaacaatgatgagttggaatttgaggaagcaccagagtttctcttaggcgatggaagttttggatccgtttatcgagctgcctacgaaggagaggaagtggctgtgaagatttttaataagcacacatctcttaggctgttaagacaagagttggtggtcctttgtcaccttcaccaccccagcctgatatccttgctggcggctggtattcgtcctcggatgttggtaatggagttggcctccaaaggttccttggatcgcctgctgcagcaggacaaagccagcctcaccagaaccctccagcacaggatcgcgttgcatgtggccgacggcctgaggtatctccactcagccatgattatttaccgtgacctgaagccccacaatgtgctgctttttaccctgtatcccaatgctgccatcattgcgaagattgcggactacgggatcgcacagtactgctgcaggatgggaataaagacatcagagggcaccccagggttccgggcacctgaagttgccagggggaatgtcatttataaccaacaggccgatgtttattcttttggcttactacttcacgatatttggacaactgggagtaggattatggagggtttgaggttcccaaatgagtttgatgagttagccatacaagggaagttgccagatccagttaaagaatatggctgtgccccatggcctatggttgagaagttaattacaaagtgtttgaaagaaaatcctcaagaaagacccacttctgcccaggtctttgacattttgaattcggctgaattaatttgcctcatgcgacacattttaatacctaagaacatcattgttgaatgcatggttgccacgaatctcaatagcaagagtgcgactctctggttgggatgtgggaacacagaaaaaggacagctttccttatttgacttaaacacggaaagatacagctatgaggaagttgctgatagtagaatactgtgcttggctttggtgcatctcgctgctgagaaagagagctgggttgtgtgcgggacacagtctggggctctcctggtcatcaatgttgaagaggagacaaagagacacaccctggaaaagatgactgattctgtcacttgtttgcattgcaattcccttgccaagcagagcaagcaaagtaactttcttttggtgggaactgctgatggtaacttaatgatatttgaagataaagccgttaagtgtaaaggagctgcccccttgaagacactacacataggcgatgtcagtacgcccctgatgtgcctgagcgagtccctgaattcatctgaaagacacatcacatggggagggtgtggcacaaaggtcttctccttttccaatgatttcaccattcagaaactcatcgagacaaaaaccaaccagctgttttcttacgcagctttcagcgattctaacatcatagcgctggcagtagacacagccctgtatattgccaagaaaaacagccctgtcgtagaggtgtgggacaagaaaacagaaaagctctgtgaattaatagactgtgtgcacttcttaaaggaggtgatggtaaaactaaacaaggaatcgaaacatcagctgtcctactctgggagggtgaaggccctctgcctgcagaagaacacggctctctggatcggaactggaggaggccacatcttactcctggatctttctactcggcgagttatccgcaccattcacaatttctgtgattctgtgagagccatggccacagcacaattaggcaaccttaagaatgtcatgctggttttggggtacaagcggaagagtacagagggtatccaagaacaaaaagagatacaatcttgtttgtctatttgggacctcaatcttccacacgaggtgcaaaatttagaaaaacacattgaagtaagaacagaattagctgataaaatgaggaaaacatctgttgaatagaaagacatcaggcagtctcgatgttatattgaataagacatcagacatcctcgtcactatattgaaaaggacatcagacatcctcgccaatatgttagaaaatgtactcttctttttaaaatatatttttaaaatgtttacattgaaaagagtatgcctattctttacaaagttcatatgtatatgaaggaatgtgtatgtcttatgtttaatttaatatatgtaaaaatatttatcagtaaatatgttttaaaaaactatttaatttagcattatattttctatactccttaactaatttgaagggataaacaaaagaaatctacaaagcatttaatttcagtatttatactaaaattaataaaaatatcatgtttgttttgctatgtattgtgatgataaagcctattttaaattgttgattaagacacagatgttgcttgattatctatggactcagcggagtagaataaaatatctggtcaatttcc

SEQ ID NO: 107 - DNA, 7156 bp, Mus musculus
ggaagtgcgtctggcccccggcggccagagcattgcagggcagagtacggtaggaccggcaggccccggccctctgatgtcgccgatccgcggcttccagaccctgccgccgcaggatgagctgtgtctgcagcgacatgactaggtgtccgtgcttcggcccatctgcaaagtggtggttgcggtgacaacagcgagactttcctttggagatctgctgcctggggagttgatggctggcacgtcacagcccgacacccagtatgtactggtgtgtggggacagaaggattagctgtgtgtccaggacctgccatggagacccataatggtgccgaagacatgggcagcaaactgtctttaccaggtggcagctccacggtgcagtgccccagcatggaagaaatccacactgcgtacaagcagaggaacctctcccgagcccgagacctactcagaggggtttgtgaagagagcgaatcctcacaggagaagggccagctgctgagcatcgcggcagcccacggggatctggagactgttcagttcctgctcactgagaagcgcgtggagctgccgacggagcccaccgatgacaacccagctgtggtggcagcgcattttggacacgccgaagtagtacgtgaactactagagtccttgccaggtccctgtaccccccagcggctactgaactggatgctggccctggcttgccagcgagggcacctggaggttgtgaagctgctggtcctgacacatggggctgacccggagaactatgccgtcaggaagaatgagttccccgtcattgtgcggttgcccctctatgcggccatcaaggcagggaatgaagacattgccatattcctgcttcggcacggagcctatttctgctcctacatcctgctggatagtcctgagccaagcaaacatctgctcaggaagtatttcatcgaagccagcgccctgcccagcagctatcccgggaaaatcgcacttcgtgtgaaatggtcccatctgaagttgccctgggtggacctggactggctcctagacatctcctgccagatcacagagcttgacctgtctgccaactgcctgccttcgctcccttccatcatcccttggggactcatcaatctaaagaagctgaatctctcaaacaaccagctgggggagctgccctgcgtgcagtcctccgacgaaatcatctgctccaggttacttgaaattgacatctccagcaacaaactgtctcacctccctcctggattcctgcacctctcaaaacttcaaaagctgactgcttccaaaaactacctggagcggctgtttgaagaagaaaacgccactaactggatcggcctgcggaagctgcaagaactcgatctagctgacaacaggctgacagagctccctgtccaatttatgcactccttcaagtctctcacctctctgaatgtctccaggaacaacctgaagagcttcccggatccctggtcctgccctttgaaatgttgtaaagcctccaaaaatgccctggaatcgctgccagacaaaatggctgtcttttggaaaagccaccttcgggatgcagatttctctgagaactctctgaaagaggtgcccctgggattgttccagcttgacgccctcatgttcttgaggttacagggaaaccagctgttgtcgctgccacctcaagagaagtggacctgcacccaactcaagaccctggacctctccagaaaccagctcggcaaaaatgaagatgggcttaaaacaaagaggatctccctgttcaccaccagagggcgccagcgttctggaactgagacagcctccatgttggaattcccagctttcctaagtgagtctttggaggtcctttgtctgaatgacaaccatcttgatgctgttcccccatcggtctgcctgctgaagaacctctcagagctctacttgggcaataaccctggcctccgagagctccctccggagctaggccagctggggaacctctggcaactggacattgaagatctgaacattagcaacgtgcctgcggaggtcaggaaagaaggcccgaaagcaacactgtctttcctgcgtgctcagctgcgcaaagcagagaagtgtaagctgatgaagatgatcctcgtgggtcccccgcgccagggcaagtccacactcctggagatcttacagaccgggaaggccccgcagctagcacacagtgaagccaccatcaggaccaccaagtgggagctccagagaccagcaggctccaaagccaaggttgagtccgtagagttcaacgtctgggacatcgggggtccggccagcatggccacggtcaatcagtgcttcttcacagacaaggcgctgtatgtggtggtctggaacctggcactgggagaggaagccgtggccaacctccagttctggctgctcaacattgaggccaaggccccaaatgccgttgtgctggtggtcgggacacacctggacctaatcgaagctaagttccgagtggagaggatagcaaccctgcgtgcctacgtgctggccctctgccgctcgccatcgggctccagggctacgggcttcccggacatcactttcaaacacttgcatgagatctcctgcaagaatctggaagggcaggaggggctgcggcaactgatcttccacgtcacgtgcaacatgaaggatgtgggtagcactatcggctgtcaaaaactcgccggcaggctgatccccaggagctacataagcctacaggaggccgtgctggctgagcaacagcgccgcagtctgggtgaccaagtacagtatctgacggacaggcagctggaccagctggtagagcagacgcctggcaatgatatcaaagactatgaagacctgcagtctgccatcagcttcctcatagaaactgggaccctgctgcactttccagacacgagccatggcctaaggaacctctacttcctggatcccatctggctctctgaatgcctgcagaggatctttaacatcaagggctcgcggtcagtggcaaagaatggggtgatccaagcggaagacctcaggatgctgctggtggggacaggcttcacacagcagactgaggagcaatacttccagttccttgccaagttcgagattgccctccctgttgccaatgacagctacctcctaccacacctccttccatccaagcctgggctggacacccacagcatgcggcacccaatggctaacaccatccagcgggtgtttaagatgagcttcgtgcctgttggcttctggcaacggttcatagcacggatgctaatcagcttggctgagatggacctgcagctttttgaaaacaagaagaatacgaaaagcaggaaccggaaagtcactatttacagttttacagggagccagagaaaccgctgcagtacattccgagtccgaagaaatcagaccatctactggcaggaagggctgctggtcactttcgatgggggctacctcagtgtggaatcctcagatgtgaactggaaaaagaaaaaaagcggaggaattaaaatcatctgccagtcagagatgagggacttctcggcaatggcttttatcacagaccatgtcaactccctgattgaccagtggttccctgccctgacggccacagaaagtgacgggaccccactgatggagcagtacgtaccctgccctgtctgtgaagcatcctgggcccagcatgcagatccaaacgagaggtcagagagcgtgcagtactttgatatggaagactgtgtgctcacagccatcgaacgggacttcatctcctgccccagacacccagacctcccagtaccacttcaggagcttgtaccagagctgttcatgactgacttcccagccaggctcttcctggagaacagcaagctggagcacacggagggtgagaacagcattctgggccaaggtggcagtggcacagtcatctaccaggcccggtaccagggccagcctgtggctgtgaagaggttccatatcaagaagttcaagaattctgctaatgccccagcagacaccatgctgcggcacctgagagccatggatgccatgaagaacttctcagatttccgtcaggaggccagcatgctgcatgccttgcagcatccttgcatcgtgtcactcatcggcatcagcatccacccgctctgcttcgccttggagctggccccgctgggcagtctcaacaccgtgctatctgagaatgccaaagattcttcctttatgcccctgggacacatgctcacccaaaagatagcctaccagattgcctcgggcctggcctacctgcacaagaaaaacatcatcttctgtgacctcaagtcggacaacatcctagtgtggtcgctgagcgccaaggagcatatcaacatcaaactgtcagactacggcatctccaggcagtcctttcacgagggggccctgggtgtggagggcaccccaggttaccaggccccagagatcaggcctcgcatcgtgtatgacgagaaggtagatatgttctcctacggcatggtgctatacgagctgctgtcaggacagcgtcctgcactgggccaccaccaacttcagattgtcaagaagttgtccaagggcatccgcccagttctggggcagccggaggaagttcagttccatcggctgcaggcgctcatgatggagtgctgggacacaaagccggagaagcgccccctggccttgtccgtggtgagccagatgaaagacccaacctttgccaccttcatgtacatgctgccctgtgggaagcagtcggccttcttctcatcccagagccaggagtacactgtggtgttctgggatgggaaggaggagtccaggaattacacggtggtcaacacagagaagggccttctggaagtacagaggatgacctgccccgggatgaagttgagctgtcagctcaaggtccagagctcagtgtggatagccacggaggaccagaaaatctatatctacagccttaagggtatgtgcccattaagcgtgccccagcaggccctggacaccccagctgtcgtcacctgtttcttggcagtacctgttatcaaaaagaactccttcctggtgctggcaggcctggctgacggactcgtggctgtgtttcctgtggcacggggcaccccaaaagaaagctgctcctacctgtgctcccacacagccaacaggtccaagttctgcatccccgacgaagatgcacggcagaacccttacccagtgaaggcaatggaagtggtcaacagtgggtctgaggtctggtacagcaacgggcctggcctcctcgtcattgactgcaccatcctggacatcagcaggcggctggagccctacgcagctccgtccatggtcacgtcacttgtgtgcagctcagactgcagaggagaggagatggtctggtgcctcgacgacaaggccaattgcttagtgatgtaccactcagccacctaccagctctgtgcccggtacttctgtggggaccccaatcctctcagggacacgttttctgtgcagccttcagtcctagaaaccccaggcagtcacaaaaccacctcaaaggggcctgtggaagagtgcatcgcggatgtgagcatcatgtacagcgaggagctgggcacgcagatcctcacccaccaggactcgctcaccgactactgctccatgtcctcttattcttcgtccccaccccaccaagatcctaggtccccttccagtctgcccagctccctcaccagctattccagtgtgcctttctctgccaactatgaagactcagacaggctgcaggagcccagtgtcacctctgacagaactgagcatgacctgagccccatggatggggagacgttcagccagcacctgcaggctgtgaaggtgcttgctgtcaaagacctcatttgggttcctagacatggaggagatatcattgtcatcggcctggagaaggattcaggtgcccagcggggcagagtcatcgctgttttaaaagcccgagagctcaatcggcacggggttctggtggatgccgcagtggtggcaaaggacaccgtagtgtgcagctttgcaaatgaaaacacagagtggtgcctggctgtctggaggggctggggcgccagggagtttgacatcttctaccagtcctatgaggagctgggccggctggaggcttgtactcgcaagagaaggtaatgcctatggaagggcctccgagtggagccagcaggtccgagccgctgcctgacccctcaactccagccctcctagggcacagaagacaagtgggttctttgctaaaccttctgctaagaagggctgagaagctaggagctactggtagtttgggagttctcaggttctgtggggaaagttaccagcccatgggaagccacagggatggttgagagaggcctcctcttgcctcttccataggcttccaggagccggggagagtgaccccactccaagccttcccggcataatgaatgggcctgtccgttttttatcgccaggcctcagatggaattacactacagagtcttggttgaggagcagttcagggtaaggtgggaggagggctgggacccctggccctccttcccccaaagacccccagtctttcagcctgtttcacaaggctctgaatccctggagtgtgaggcccagcttggtggaactgagatcgcatctcctgctcggcaaaggctgcacatgggaaaccccagaaggacctgggcaggcagcattgcccaatagcagagatgaatggattccttcaagagtcatggccggaaagcccagtgcaagggtcctggtctcctttacattcttctcccccgacaaaaggaaggagaaaaccaatctctgggccagagaaagggctgtgttatgacttggtaaaaataacctggacaccgttggagcacaagcgcggtaggttgccatcataatctgttatcactttaacaattaggtaatatctcagggtaagctggtgtgaatccatcgatggactctactgaatcggattgcaaattacggccgtggcgggatagaaaggattgtacagg

SEQ ID NO: 108 - DNA, 3192 bp, Mus musculus
ggggttgcgctggggtgggtgtccagcgctgtaggaggaacgcggtgggaggaaggcttgcgggcgtgcggactcggcttcgggccgagcgctttgaagaattttgcagaaccctgctacctacagactctgccatggatgtcatgtaaagaaaccccggatgtagtaacggacaaaacatgagtcagtttgtgttgtggcattcagatctgaacacactgggagaggttttggagtcctctcttgcatcaaacctctgttgctgcaatcttctgactgtcatctcaggacctgggtcaccctcatggcacaatggccaaccctcaggagcacctgagctgctcctctttgccacacttgcccttgactgagaacaaaacctctggtggacgaaatgagcttgcagctatggggaaccacccttcacccaagctccctgaggaccctcaggagaggggggctatacagtcagagctgatggagatcacaggcagcccgatctccacaacagtgttgaccagtgtaagcgaggattctaggggccagtttgagaacagtgttcttcagctaagggaacaggatgagtcagagatgaccctgtctctggggaacagcaacactgtggatggagagaacacgaacggaccagaagacatcaagattcagttcagcaggtcaggcagcggcagcggcgggtttctcgaaggactgtttggatgtctcaggcccgtgtggaatatcattgggaaggcatattccactgattacaagctgcagcagcaagatacttgggaagtgccatttgaggaaatctcagagctgcaatggctgggtagtggagcccaaggagctgtcttcctgggcaaattccgagcagaggaggtggccatcaagaaggtgagagaacaaaatgagacggacatcaagcatctgaggaagctgaagcaccctaacatcatcgccttcaagggtgtttgcactcaggccccgtgctactgcatcatcatggagtactgtgcccacggacagctgtacgaggtcctgagagctggccggaagatcacgccccggctgcttgtggactggtccacgggaatcgccagtggaatgaattatctccatctccacaagattatacaccgtgacctcaagtcgcccaatgttttagtgactcacacagatgcagtgaaaatttcagactttggcacatctaaggaactcagtgataaaagcaccaagatgtccttcgctggcaccgtcgcgtggatggcaccagaggtgatccggaatgagcctgtctcggagaaggtggacatatggtcatttggtgtggtactttgggagctgctgacaggggagattccctacaaggatgtggactcttccgccatcatttggggtgtcggcagcaacagcttgcatctcccagttccttccacttgcccggatggattcaaaatccttatgaaacagacatggcagagtaagcctcgcaaccgaccttctttcaggcagacgctcatgcatctggatatcgcgtctgcagatgtgctcgccacccctcaagaaacttacttcaagtctcaggctgaatggagagaagaagtgaagaaacattttgagaaaatcaaaagtgaagggacctgtatacaccgattagatgaagaactgattcgccggcgcagggaggagctcaggcatgctctggatattcgggagcactacgagagaaagctcgaacgggctaacaatctgtacatggagctgagcgccatcatgctgcagctggagatgcgcgagaaggagctccttaagcgagagcaagcagtggaaaagaagtaccctggaacctacaaacgacaccctgtccgtccaatcatccacccgaatgccatggagaaactcatgaaaaggaagggtgtgcctcacaaggctggggtgcagactaagcggccagacctgttgcgatccgaaggcattcctagtacagaagcggttcccactgcatcccccctgtctggaagtcccaaaatgtccaccgcaagcagcagaagccggtaccgaagcaaaccacgtcaccgccgagggaacagtagaggcagccatagcgacttcgcagcaatcttgaaaacccagcccgcccaggaaaattcaccccaccccacctacatgcaccacactcaggctcagtgcgcttcagtccatcaacataaccctctccagcagcaataccagcaaattcctcctgcccagcctcagagccggcatcccagactcaatgcgcatgggcaggacattgcaacctgcgccaataacctgaggtactttggccccgcagcggccctgcggagtccactcagcaaccatgcacaaagacagatgcctggctcaagccccgacctcatctccacagccatggctgcagattggagaaattctgaacttgatcaagaccaagttggaccctggggctgttgtcaggctgaaccctatgatccctgtttccagtgcaggccagaacattctgggtctttagatgttcccactactgagccagtggggaggagcccagacctttccagttcaccagcacacaatcctctttcaggaaatgcccaaggctctgagagaacaggggcaaatggattcagtggctgtcagtctggtatttctcatcaattcacacccccaatgctacctcagaagacacggccccttcagaagagtggcgatgactcctcagaagaggaaggggaagtggacagtgaagtagaatttcctcgacgacagaggcctcaccgctgcattagcagttaccagtcatactcaacctttagctccgagaacttctctgtgtctgatggagaggagggcaacactagtgaccactcgaacagtcccgatgaatccgccaacagacggcaggaccgcctggcagagacgctggacgacctgctgtctcagacacccgaggcccccatcgagatctcctcccactcagatgggctgtctgacaaggagtgtgctgttcggcgcgtgaagacacagatgtccctaggcaagctgtgtgccgaggagcgcggctacgagaaccctgtgcagtttggagactcggactgtgactcttcagagggagagtgttccgatgccacagttaggaccagcaagaactacagctctgccacctggtga

SEQ ID NO: 109 - DNA, 3476 bp, Mus musculus
gaggggcggccgcttgctgccctcggcctcggcctccgccggcgggccccgctcgacccggccctccctgcgccctgacatcgttggggacaggtgaacctaacgcctctcctgcacagccaaatccgagggatcggtcctatcgtttgaaaaaggtgttttttaggtttttggggttttttttctttttaattccttcgctccagcggaggcccctcccccagctatggtccccaggagccccccggggtccgcagggactgtctcccatcccggcctcccggccccgcgctcagcattccgcgggcagcctgcgtgaagcggcctcccgcagcccccggcccctcccccatggaggaggaggagggggcggcggccagagagtggggcgcgacccccgcggggccagtgtggaccgccgtgttcgactacgaggcggtgggcgacgaggagctgaccctgcggagaggcgaccgcgtccaggtgctttcccaggactgtgcggtgtctggagatgagggctggtggacagggcagctgcccagcggccgtgtgggcgtcttccccagcaactacgtggcccccgctgcacccgccgcaccctcagacctccagctgccacaggagatccccttccacgagctgcagctggaggagatcatcggtgtcgggggctttggcaaagtctatcgcgccgtatggcgtggagaggaagtagcggtcaaggccgctcggctggaccctgaacgggacccggcagtgacagcggagcaggtccgccaggaggcccggctctttggagccctgcagcaccccaacatcattgccctgaggggcgcctgcctcagccccccaaacctctgcctggtgatggaatatgctcggggaggtgcattgagcagggtactggcaggtcgccgggtcccccctcatgtgctggtcaactgggctgtgcaggtggctcggggcatgaactatctacacaatgatgcccctgtgcccatcattcaccgggacctcaagtccatcaacatcctaatcctggaggccattgagaaccacaacctcgctgacacggtgctcaagatcacagacttcggccttgcccgagagtggcacaagacgaccaaaatgagtgcagcggggacctacgcctggatggctcctgaggttatccgcctgtccctcttctccaaaagcagcgacgtctggagcttcggggttcttctttgggagctgctgaccggggaggtcccctaccgagaaatcgacgccttggccgtggcttacggtgtggctatgaacaagctgacgctacccatcccctccacgtgccccgagccctttgcccgcctactggaggaatgctgggacccagaccctcacgggcgaccagattttggcagcatcctgaagcagctggaggtcatcgagcagtcagccctgttccagatgccactggagtccttccactccctgcaggaagactggaagctggagattcagcatatgtttgatgaccttcggaccaaggagaaggagttgcgcagccgggaagaggagctattgcgggctgcacaggagcagcgttttcaggaagagcagctacggcgtcgggagcaggagctggcagagcgagagatggacatcgtagaacgtgagctgcacctgctcatgagccagctgagccaggagaagcccagggtccgaaaacgcaagggcaacttcaagcgcagccgcttgctcaagctacgggaaggaagcagccacatcagcctgccctctggatttgaacataagatcaccgtccaggcctccccaaccctggacaagaggaaaggatccgatggggccagccctcctgccagccccagcatcattccccggttgagggccattcgattgactcccatggactgtggtggcagcagtggtagtggaacatggagccgcagtgggccaccaaagaaggaagaactggttgggggcaagaagaaaggcaggacatggggccccagttccactttgcagaaggagcgagctggaggagaggagaggctcaaggccctgggggaaggaagcaagcagtggtcctcgagcgcccccaacctgggcaaatcccctaagcacacccccatggccccaggcttcgccagcctcaacgagatggaagaatttgcggaggcagatgaaggcaacaacgtgcccccttctccctactccaccccgtcctacctcaaggtgcctctgcccgccgagccttctccttgtgttcaggcgccttgggagccgccggctgtcaccccttcccggccaggacacggagctcgtaggcgctgcgacctggcgctgctaagctgtgccacgctgctgagtgcggtgggcctgggcgccgacgtggccgaggcacgggccggggacggtgaggagcagcggcgctggctggacagtctcttcttcccgcgccccggccgcttccctcgcggtctcagcccaaccgggcgccccggaggtcgccgcgaagacacagccccaggcttgggtctggcaccctcggccaccctggtgtcattatcctctgtatcggattgtaactctacgcgctcattgctgcgctctgacagtgacgaggctgcccctgccgccccctccccgccgccttctccgctcgcgccctcacccagcaccaatcctctcgtggacgtggagttggagagcttcaagaaggacccccggcagtcacttacgcccacccacgtcactgccgcccacgctgtgagccgtggacacaggcggacgccatcagatggggctttgagacaacgggagcctctggagctcaccaaccacggtcctcgagaccccctggacttccctcgactgcccgacccccaggccctgttccctacccgacgccggcccctggagttccctggccgccccaccaccctcacttttgccccaagaccccggcctgctgccagccgcccccgtctggatccctggaaactggtctcctttggccggacactcagcatctcgcctccaagcaggccagacactccagagagccctgggccccccagcgtgcaacccacgttgctggacatggacatggagggccagagccaggacaatacagtgcccctatgtggggtctatggctctcactgagacctgcccaccaccacccgcctgggcagccatgaatgtagcgccccaggcctgccacagcccaccatttgccaaggtgggggaggccctgggcaggatactcactctatttattggggaaggggggaggggaggacacttaatttattcctttgtaccccaggttgtggagctctgagcccaatctgctgtggggagagggtgggtgggcagggatactcagggacagaatattgtgggggatctggcacaaggcgcagcattaaaggtaagccctgccccctaaaaaaaaaaaaaaaaaa

SEQ ID NO: 110 - DNA, 2625 bp, Mus musculus
gaggctcggctgcgccggggccgccggcgggttccagaggtggcctccgccccggccgctccgcccacgccccccgcgcctccgcgcccgcctccgcccgccctgcgcctcccttccccctccccgccccgcggcggccgctcggcccggctcgcgcttcgaagatggcggcgctgagtggcggcggtggcagcagcagcggtggcggcggcggcggtggcggcggcggtggcggtggcgacggcggcggcggcgccgagcagggccaggctctgttcaatggcgacatggagccggaggccggcgctggcgccgcggcctcttcggctgcggacccggccattcctgaagaggtatggaatatcaagcaaatgattaagttgacacaggaacatatagaggccctattggacaaatttggtggagagcataacccaccatcaatatacctggaggcctatgaagagtacaccagcaagctagatgcccttcagcaaagagaacagcagcttttggaatccctgggtaatggagcagatttttctgtttctagctctgcatcaatggacaccgttacatcctcctcctcttctagcctttcagtgctaccatcatctctttcagtttttcaaactcccacagatgcatcacggaacaaccccaagtcaccacagaaacctatcgttagagtcttcctgcccaacaaacagaggacagtggtacccgcaagatgtggtgttacagttcgagacagtctaaagaaagcactgatgatgagaggtctcatcccagaatgctgtgctgtttacagaattcaggatggagagaagaaaccaattggctgggacacggacatttcctggcttactggagaggagttacatgttgaagtactggagaatgtcccacttacaacacacaactttgtacggaaaacttttttcaccttagcattttgtgacttttgccgaaagctgcttttccagggtttccgttgtcaaacatgtggttataaatttcaccagcgttgtagtacagaggttccactgatgtgtgtaaattatgaccaacttgatttgctgtttgtctccaagttctttgagcatcacccagtaccacaggaggaggcctccttcccagagactgcccttccatctggatcctcttccgcacccccctcagactctactgggccccaaatcctcaccagtccatctccttcaaaatccattccaattccacagcccttccgaccagcagatgaagatcatcgcaatcagtttgggcaacgagaccggtcctcctcagctcccaatgttcatataaacacaattgagcctgtgaatatcgatgatttgattagagaccaggggtttcgtggtgatggagggtcaaccacaggcttgtccgccaccccgcctgcctcattacctggctcactcactaacgtgaaagccttacagaaatctccaggtcctcagcgggaaaggaagtcatcttcttcctcatcctcggaggacagaagtcggatgaaaacacttggtagaagagattcaagtgatgactgggagattcctgatggacagattacagtgggacagagaattggatctgggtcatttggaactgtctacaagggaaagtggcatggtgatgtggcagtgaaaatgttgaatgtgacagcacccacacctcaacagctacaggccttcaaaaatgaagtaggagtgctcaggaaaactcgacatgtgaatatcctccttttcatgggctattctacaaagccacaactggcaattgttacacagtggtgtgagggctccagcttatatcaccatctccacatcattgagaccaaatttgagatgatcaaacttatagatattgctcggcagactgcacagggcatggattacttacacgccaagtcaatcatccacagagacctcaagagtaataatatatttcttcatgaagacctcacggtaaaaataggtgactttggtctagccacagtgaaatctcggtggagtgggtcccatcagtttgaacagttgtctggatctattttgtggatggcaccagaagtaatcagaatgcaagataaaaacccgtatagctttcagtcagacgtgtatgcgtttgggattgttctgtacgaactgatgaccggccagctaccttattcaaacatcaacaacagggatcagataatttttatggtgggacgaggatacctatctccagatctcagtaaggtacggagtaactgtccaaaagccatgaagagattaatggcagagtgcctcaaaaagaaaagagacgagagaccactctttccccaaattctcgcctccattgagctgctggcccgctcattgccaaaaattcaccgcagtgcatcagaaccttccttgaatcgggctggtttccaaacagaagattttagtctgtatgcttgtgcttctccgaaaacacccatccaagcagggggatatggtgggtttccagtccactgaaacaccctgagtgagacattaaagtaaggtagcaacaaaaacaaatgaacaggttcccttatatttaaattaagtaggatactctgttatttacaggtgagccaaa

SEQ ID NO: 111 - DNA, 2895 bp, Mus musculus
ggggttgcagagcaagcgatggatgaggaaaacatgacgaaaagcgaagagcagcaacctctgagtttgcaaaaagccttgcagcagtgcgagttggttcagaacatgatcgacctgagcatctccaatctggaagggcttaggaccaagtgtgcagcttccaacgacctcacgcagaaggagatcaggaccctggagagcaagctggtgaagtacttcagccgacagctgtcctgcaagaagaaggtggctctgcaggaacgcaatgctgaactggacggcttcccccagctccgccactggttccggatcgtggatgtccgaaaggaagtcctggaggagatctcccctgaccagctgagcttggaggacctcctggagatgaccgacgagcaggtgtgtgagaccgtggagaagtatggagccaaccaggaagagtgcgcccggctcaacgcctcactctcctgcctcaggaatgtgcacaaatcaggagggaatctctccaaacaagattggatcatccagtggcccaccacggagccagggcaggagagcaaccctgtgtgccccccggagcccagcccgtggatccgaacccacctctcccagagccccagggtccagaccaagtgtccccagcacttctgtcctaccagccctacgcctgggacccctgtgtacacccaagtggacagactcactgtagatgcctacccgaacttgtgcccgccgccgccacccctggaatcaggccaccgctctctgcccccgtctccccggcagcggcacgtagtccgcaccccacctcgcaccccaaatattgtcaccaccgtgaccccacctggcacgccacccatgaggagaaaaaacaagctgaagcctcccgggacgccacccccctcctctcggaagctcatccatctgatccctggcttcacagcgctgcacaggagcaaatcccacgagttccagctcgggaaccgtgtagacgaggccaacacacccaaagccaagaagaagagcaaacccttgaacctcaagatccacagcggcgtgggcagctgcgagaacatccccgcccagcaacgctctccgctcctgtccgagcgctccttgcggtccttctttgtgggccacgggcccttcctgccctccaccccacctgtccacactgaagccaatttctctgcaaacacactctctgtacctcgctggtcaccacagatcccacgcagagaccttggcaattccatcaagcacaggttttccaccaagtactggatgtctcagacgtgcacggtctgcgggaaagggatgctttttggcctcaagtgtaaaaactgcaagttaaagtgccacaataaatgcaccaaagaagccccgccctgtcacctcctgattatccaccgaggagactctctctgttgtttttaccctacggacccagcaaggttagtgcgaacggagtcggtgccctgtgacatcaacaacccggtccggaagcctgcccgatattcagatctccacatcagtcagactctccccaaaaccaacaaaatcaacaaggaccacatccctgtcccttaccagccagactccagcagcaatccctcctccacgacgtcctccacgccctcctcaccggcaccccccctccctcccagcgccacgccgccttctcccctgcacccctccccgcagtgcccgagacagaaaaagaacttcaacctgccagcttcccactactacaaatacaagcaacagttcatcttcccagatgtggtgcctgtaccagagacacccacccgggcaccccaagtcatcctgcatcctgtcacctcaaatacaatcttggaaggaaacccattacttcaaattgaagtggaaccaacctccgagaacgaagagagccacaatgaagcagaggagtccgaggacgagtttgaagagatgaacctatccctcctctcagcccggagcttcccacgcaaagccagccagaccagcatcttccttcaggagtgggacatcccgtttgaacagctagagattggcgagctcatcgggaagggtcgcttcgggcaggtttaccacggacgctggcacggcgaggtggccatccggttgattgacatagagagggacaatgaggaccagcttaaggccttcaagcgggaagtgatggcctacaggcagacgaggcacgagaacgtggtgctcttcatgggagcctgcatgagcccaccccacttggccatcatcaccagcctctgtaagggacggacactctactctgtggtgagggacgccaagattgtcttggatgtcaacaaaaccaggcagatcgcgcaagagattgtaaagggcatgggctacctccacgccaaggggatccttcataaggacctcaaatcgaagaacgtcttctatgacaacggcaaagtggtcatcacagactttgggctcttcagcatttccggggtgctgcaggctggccggcgggacgacaaactgcggatccagaacggctggctgtgtcacctggccccagaaatcatccgccagctgtcccctgacacagaagaggacaagctcccattctccaagcactcggatgtctttgcgcttggcaccatctggtatgagctccacgccagggagtggccattcaagacccaaccagcagaggcaatcatttggcagatgggcacgggaatgaagcccaacctcagccagattggcatgggaaaagaaatctcggacatactgctcttctgctgggccttcgagcaggaagagcggcccacctttaccaagctcatggacatgctagagaaactgccaaagcgaaaccgccgcctgtcgcaccccggacatttctggaagtctgcagag

SEQ ID NO: 112 - DNA, 3914 bp, Mus musculus
agtgtgcttttgtgctttcagaccatcctcaaagaaggcatgctgaccaaacagaacaactcgttccagcgatccaagaggaggtactttaagcttcgagggcgaacactttactatgctaaaactgcaaagtcgattatatttgatgaggtagacctgactgatgccagcgtagcagaatccagcaccaaaaatgtcaacaacagttttacggtcatcactccatgtaggaagctcatcttgtgtgccgacaacaggaaagaaatggaagattggattgcagcactcaagactgtccagaacaaagagcattttgagcctacccaatatagcatggaccatttctcagggatgcacaactggtatgcttgttcccatgcacggccaacctattgcaatgtgtgtcgtgaagttttgtcaggggtcacatcccatgggctatcctgtgaagtgtgtaagtttaaggctcacaaacgttgtgctgtgcgtgcaactagtaactgcaagtggaccacattggcctcaatcgggaaggatatcattgaggacgaggatgggattgccatgcctcaccagtggttggaaggaaacctgcctgtgagtgccaagtgtatcgtgtgtgacaagacttgtggcagcgtgttacgcctgcaggactggcgctgcctctggtgcaaagccatggttcacacatcttgcaaagagtccttggtgatgaagtgtccacttggcctgtgcaaggtgtctgtcatccctcccacggcactcaacagtattgactccgatgggttctggaaggccacctgtcccccgtcttgtacaagccctctgctggtttttgtcaactcaaaaagtggagacaatcaaggtgtgaagtttctcagaagattcaagcagctgctgaaccctgcccaggtttttgacctcatgaatggaggaccacaccttggcttacggttatttcagaagtttgacaccttccggattctggtttgtggcggggatggcagtgttggctgggtcctctctgaaatcgatagcctcaaccttcacaaacagtgtcagctaggtgtgctgcccctggggacagggaacgacctggcccgtgttcttggctggggctctgcctgtgatgatgatacacagcttcctcagatcttggcaaagctggagagggccagcactaagatgctggacaggtggagtgtcatggcatatgagaccaagctccctcggcaggcctcctcctccactgtcactgaggacttcagcgaggactcagaggtgcagcaaattctcttctatgaagactcagtcgcagctcatctttctaaaatcttaacttcggaccagcattctgtggtgatctcatcagccaaagtgctctgtgagacagtgaaggactttgtggctcgagtgggcaaggcctatgagaagacgacagagagctcgcaggagtcagaggtcatggccaagaagtgctctgtcttgaaagagaaactggactctctcctcaagaccttggatgacgagtctcaggcttcatcctctctgtctaacccacctcctaccattgctgaggaggctgaggatggggacggatcaggcaacatctgtagctctactggggaccatttggtgggctcggcatgcccctcccggccacagatcttccggccccgggagcagctaatgctgagagccaacagcctgaagaaagcaattcgccagattatagagcacacagaaaaagcggtggatgagcagaatgcccagacccaggagcagcagggttttgtcctaggcctctctgaatctgagaagaaggacttgaagactgacaacagggtgtgcacatcatctgtccatagtgagagctgtgtgattgccaaggggagaagtcaacgcaaagcatccagggccccttgtgagaagctggtgagcaaaggcctgtcactcggcagctctgcctcactccctcctggtacaggaagccgggacagcctgcctgctctgaacaccaagatcctatatccaagtgttcgggcagggatgtctggctccttgccagggggctcagtcatcagtcgcttgttaattaatgctgatccctttaatgctgaacctgaaaacctagaatactacacagagaagtgtgtcatgaacaactattttggcattggcttggatgcaaagatatctctggacttcaacaacaagcgtgatgagcacccagagaaatgcaggagtaggactaagaacatgatgtggtatggtgtccttggcaccaaagagctgctgcacagaacctacaggaacctggaacaaaaggtcctgctggagtgtgatggccgccctattcccctcccgagtcttcaaggaattgctgtcctcaacattcccagctatgctggagggaccaacttctgggggggcaccaaggaagatgatacttttgcagctccatcattcgatgataagattctggaggtggttgctgtgttcggcagcatgcagatggctgtgtctcgtgtaattaagctacagcatcatcggattgcccagtgtcgcacagtgaagatctccatcctgggggatgaaggcgtgcctgtgcaggtggatggggaagcctggatccagccacctgggtacattcggatcgtgcacaagaacagggcgcagacattgaccagagacagggcctttgaaaacaccctgaagtcttgggaagacaaacagaagtgtgagctgtcccgcccaccctccttttccctgcaccctgagatcctgtctgaggaggaagctacccagatggatcagtttgggcaggcagcagggggcctcattcacagcattcgggagatagcacagtcccacagagccatggaacaggagctcgcacatgctgtcaatgccagctccaaagccatggagcgagtatacggcaagcccagaactgcagaggggttgaactgtagctttgttctggagatggtgaataacatcagagcactgcgcagtgagacagagctgctgctggctgggaagatggccctgcaattggatccccctcagaaggaacggctcggggctgccctaattgagatggaccagcagctcaggaagctgacagacactccctggctttgccagcccttggagcctggtgaggaagagaatgtgatgctggatcttactaaacgcagccgtagtggtaaattccgccttgtgaccaagtttaaaaaggagaaaaacaataagaacaaagaagttcacagtaacctaggaggccctgttcacctctgggggacagaggaggttgctgcctggctggagcacctcagtctctgtgagtataaggacatcttcacgcggcacgacatccggggctctgagctcctgcacctggagcggagggacctcaaggaccttggtgtgaccaaagtgggccatatgaagaggatcctttgtgggatcaaggagctgagccggagctcccctgccgccgaggcctagcctctgcgttctctgcctgcattctccgctcctcccgagactgaggcctagggaggacactgccagcactcagcccctggcctttctcatggtgctattccttttgttagagacaggaagcccaatgcccgttggtaacagctttggagtcttgaacataccaacacagctacctttgagagaatacttttcctagctgcagtcatttggggcagactgtgtcacatccacttgtggctcttgctaacctgccttgtgggccacagggaatgtggtgaatgaagcctgaccacccagcacctggcatccctgcagaaccttcttacctggggcacatgcttggattgtgctgtgcactccttttctgtgtcctttattggtcacactgggtaagaaaa

SEQ ID NO: 113 - DNA, 3383 bp, Mus musculus
gagtttcccacaatgccccggtgcggtgcagccgcggatggatgctgcgggaaggggctgccatttgctgcccctgccagcggcgcgcggacctgcccgcgctcccgccgcctccagcgccctcagcccgaccggcctctgcagcggcaccacctcggcttctttcgcggccgccggagcggtcgccatgaaccccagctcctcggcgggagaggagagaggggcgacgggtggcagcagcagcagcggaagcggcgccgggagctgctgcctgggcgccgagggcggcgcggacccgcggggtgcaggggcagcggctgctgctgccttggaggagcccgcggccgccggacagaaagagaaggaagaggcgctggaggagaagctgagggacttaactttccggaagcaggtctcttacaggaaagccatctcccggacaggcctccagcatctggcacctgcacatcctcttggtcttcctgtggctaacggtccagcgaaggagcccagagccactctggactggagcgagaatgctgtgaatggggagcacctgtggctggagaccaacgtttcaggggacctctgctacctgggggaggagaactgccaagtccgatttgcaaaatccgctctcaggaggaagtgtgccgtctgcaaaatcgtggtccacacagcctgcattgagcaactagagaagattaatttcagatgtaaaccaacatttcgggaaggaggctccagatcgccaagagaaaactttgtgcgtcaccactgggtccacaggaggcggcaggagggaaaatgtaagcagtgtggtaagggcttccagcaaaagttctccttccacagtaaagagatcgtggccatcagctgttcttggtgcaagcaggcgtttcacaataaagtgacctgcttcatgctgcatcatattgaggaaccctgctccctgggggctcacgccgctgttattgtcccgcccacctggatcattaaggtgaagaaacctcagaactccctgaaggcttccaaccggaagaagaagaggacaagttttaaaaggaaagccagtaaaagaggaactgagcaggaaaccaaaggccgtccttttgtgatcaagcccatctcctcccctctcatgaagcctttgcttgtctttgtgaacccaaagagtgggggaaaccagggaaccaaagtcctacagatgtttatgtggtacctgaatccacggcaagtctttgatctttctcaggaagggccaaaagatgcgctggagatgtacaggaaggtaccaaatctgagaattctggcctgcggtggggatggaacggtgggctggatcctctccatcctggacgagctgcagctgagcccacagcctcctgtgggggtgcttccactggggactgggaatgacctggctcggacgctcaactggggagggggttacaccgatgagcctgtttctaagatcctgtgccaggtggaagatgggaccattgtacagttggatcgctggaacctccacgtagagagaaacccagacctgccgcccgaagaacttgaagatggcgtgtgtaagcttcctctgaatgtcttcaataattacttcagccttggatttgatgctcacgtcacattggagttccatgaatcccgagaagcaaatccagagaaattcaatagtcgttttcgaaataaaatgttctatgcaggggcagccttttctgatttcctacaaagaagttctagagatctatccaaacacgtcaaagttgtctgtgatgggacagacctcaccccaaagatccaggacctgaagttccagtgtatagtatttttaaatattcccagatattgtgctggcacaatgccttggggaaaccctggagatcatcatgactttgaaccccaacgtcatgatgacggctacattgaagtcattggattcactatggcctctttggctgccctgcaagttggggggcacggagaaaggctgcaccagtgtcgggaagtgatgcttctgacttacaagtccattcccatgcaagtggacggggagccatgtcggttggcacctgctatgattcggatctccttgaggaatcaggccaacatggtacagaagagcaagcggagaacctcgatgcctttgctcaatgatccccagtctgtcccagatcgcctgaggatccgtgtgaacaaaatcagtttacaagactatgaaggactccactatgacaaggacaaactccgggaagcttgtaagttactagtgcccgaggggcacttggtgagtctctttggtcttgccatccctctgggtattctagttgttcgtggagactgtgatttggagacttgccgtatgtacatagaccgtctacaggaggaccaagaaacctccttccccagggcactctcagctcagaggctgtccccacggtggtgcttcctagatgacagatctcaggaacatttgcactttgtgatggagatttctcacgatgaaatttttattctggacccagatatggtggtgtcacagcaggcagggacccctccaggaatgcctgacctggtggttgaacaggcttctgggctgtctgactggtggaaccctgccctgaggaaacgtatgctgagtgacagtgggatgatcacaccccactatgaggactcagatctgaaagacttcagccactccagagtgctacagtccccagtctcttcagaagatcatgcaattttgcaggcagtcctcaccggtgaccttatgaagctcatggagagctataagaatggagggagcttactaattcagggaccagggcactgttctctccttcactacgcagctaagaccggcaatggggacattgtgaagtacatccttgaccacggacctgcagaattactggatatggcagacagtgaaacgggcgagactgcactgcacaaggctgcctgccaaaggaaccgggctgtatgccagcttctggtggatgcaggagcatctctgagacagacagactccaagggcaagacaccccaggaacgagcacagcaggccggggacccagatttggctgcttacctagaaagccgacagaactataagatcattggccatgaagacctggaaactgctgtttgactgtggtagacaggcaagaagaacttgagcaagcgtatcacctacgccctcccagccactgggcagctcccctggaagaagctaatggaatccatatttgcctctcctgcaaggatctatctgagaatatgctaccaggtttcaagggctacagggatgtacaacaggacacgatagcccattgagaaggaggcaggctaccggagatttgtggcgtaca

SEQ ID NO: 114 - DNA, 3136 bp, Mus musculus
gagcctgcgcgttaggtagcgcagtcggaagccgggagcgggctctgccgagggccctctctacaccgcggacctggctttatcgtgcgcttggagctggggcgctcgggttgtggatggcggcggcagccgagcccggtgcccggacctggccgggcagtggttccccacgtcttggcagcccggccggcagtccagtgctgggcatctcgggccgcacacgcccggggtcagggccggagcggactagcagagctattggctccgcagcacctggccacagctttcgcaaggtgacactcaccaagcctaccttctgccacctctgctcggacttcatctggggactggctggcttcctgtgcgatgtctgcaacttcatgtcccatgagaagtgcctgaagcaggtgaagaccccgtgcacaagcattgcaccaagcctcgtccgggtgcctgtagcccactgctttggttcccttggtctctacaagcgcaagttctgtgtggtctgccgcaagagcctggaggtacccgcattccgctgtgaagtgtgtgagctgcacgttcaccccgactgtgtgcccttcgcctgcagcgactgtcgtcagtgccaccaggatggacagcaggattatgacacgtatcaccaccactggagggaggggaacctgccttctggtgcacgatgtgaggtctgtaggaagacttgtggttcctcagatgtgctggctggtgtacgctgcgagtggtgtggtgtacaggctcactcagtgtgctccacagcacttgcgcctgagtgtacatttggacgtctacgctccatggtactgcctccttcgtgtgtgcgcctgttgtcccgaaacttcagcaagatgcactgtttccgaatccctgagaccatggtcctggagcttggtgatggggatgatggcgtagacgggagtgctgctataggcacaggcagagaggtactgacagctacagagtccaccaaacagaccctgaagatctttgatggcaacgactccatgaggaaaaatcagtttcgtctggttacagtttcccgcctggctcggaatgaggaagtgatggaggcagcacttcgggcctactatattagcgaggaccctaaggacttccagctgcaggcactgcccctgtctggcaatgcccaggctctggggaaggctgggaccactgaggaggaggctagtaaaggctcttgtccccgggattccgtgcctgaggcctgggtcatcaggtctttgcctcgtacccaagagatcctgaagatctaccctggctggctcaaggtaggtgtggcctacgtgtccatccgtgtgaactcccagagtacagcacggtctgtggttcaagaggttctcccactgtttggacaacaggttgaggataaggagagattccagctgattgaggtgctcatgagcagcagacaagtccaacggaccgtgctggcagatgaagaacctctgctagaccgactctgggacatccgacagacttctgtgcgccaggtgagccagacgcggttctacgtggccgagaccagggccacggccccacgtgtctccctgttcgtgggtggcctgccacctggcttgtccccccaggattacagcaacctgctgcatgaggccatggccaccaaagctgctgtggtgtctgtgagtcacgtctactccttacaaggtgcagtaattctggacgtcacctgcttcgcggaggctgagcggctatacatgctggccagggacacagcagtgcatggccggccactgactgcattagtgcttccagatgtgctgcacacgaagctgcctcctgactgctgccctctcctcgtgtttgtgaaccccaagagtgggggtctcaagggacgagaactgctctgcagtttccggaagctgctgaatccgcaccaggtctttgagctaaccaacgggggccctcttcctgggttccaccttttctcccaggtgcccagttttcgggtactggtgtgtggtggagatggcaccgttggctgggtgctcgctgccctggaggagacaaggcgccatctggcctgtccagagccatctgtggccatcttgcccctgggtacagggaatgaccttggccgggtccttcgttggggggcaggctatagtggtgaggacccattttctgtgctggtgtcggtggatgaggctgatgctgtgctcatggatcgatggacaatcctgctggatgctcatgaaattgatagtacagagaacaatgtggtagaaacagagccccccaagattgttcagatgaataactactgtggcattggtattgatgcggagctcagcctggacttccaccaggcacgtgaagaggagcctggcaaattcacaagcaggttccacaacaagggcgtgtatgtgcgggtcgggctgcagaagatcagccactctcgaagcctacacaaggagatccggctgcaggtggagcagcaggaggtggagctacccagcattgagggtctcatcttcattaacatccccagctggggctcaggggccgacttgtggggctctgacaacgactcaaggtttgagaagccacgcatagacgacgggctgttggaggtggtgggtgtgacaggtgtcgtgcacatgggccaggtacaaggtgggctacgctctggaatccgcattgcccagggctcctacttccgtgtcacactcctcaaggctactccagtgcaggtggatggtgagccctgggttcaggccccaggtcacatgatcatctctgctactgcacctaaggttcacatgctgagaaaggctaagcagaagcccaggaaggctggcgccaacagggatacccgagtggacaccttgcctgctcctgagggcaatcctttatagaggagccaagatgagaggtctcaaccacccagcctttctttggttggtcacacactggctggccagcagatggacttagctgtagcactgaccatagcatcttcatgggtcttgggatgtttccatcccaatgtcatgtgcaaacttaggagtgggtaggtaatggtcattactcacgctgccatacatagtaccaatgtatatcactgggcatg

SEQ ID NO: 115 - protein, 1556 aa, Mus musculus
MEQRLRALEQLVRGEAGGSPGLDGLLDLLLGVHQELSSAPLRRERNVAQFLSWASPFVTKVKELRLQRDDFEILKVIGRGAFGEVAVVRQRGSGQIFAMKMLHKWEMLKRAETACFREERDVLVKGDSRWVTALHYAFQDEEYLYLVMDYYAGGDLLTLLSRFEDRLPPELAQFYLAEMVLAIHSLHQLGYVHRDVKPDNILLDMNGHIRLADFGSCLRLNNNGMVDSSVAVGTPDYISPEILQAMEEGKGHYGPQCDWWSLGVCAYELLFGETPFYAESLVETYGKIMNHEDHLQFPADVTDVPASAQDLIRQLLCRQEERLGRGGLDDFRKHPFFEGVDWERLATSTAPYIPELRGPMDTSNFDVDDDTLNRPETLPPSSHGAFSGHHLPFVGFTYTSGSPFDVQSSELMAAPEGTPHCVEQVKVELSHKCQEPLHGPLQPQELVRLQKEVQVLQEKLAETLRDSKASLSQTDGLHARSPAPNIQLQQEKDRLQQELTEAQAALRVQDAELCQAQNRQEEFLQRLWEAQEREAAAASQIQALNSQLEEAWVVRRELEGQVTTLSQEVTRLQGQCKQESSQAKTVHAAPETNGIGSPEGQSQEAQLRKEVAALREQLEHACSQGISVGKEEVLCRLQEENQRLSREQERLAGELELELQSKQRLEGERRETESNWEAQIADILSWVNDEKVSRGYLQALATKMAEELESLRNVGTQTLPTRPLKMEASARLELQSALEAEIRAKQSLQEQLTQVQEAQRQAERRLQEAEKQSQALQQEVAELREELQARGPGDARPSTSLIPLLSFWNTEKDSAKDPGNSGEGPRSGAEAELRPEGRRSLRMGSVFPRVPAATTTPAEGPPAKGTGGRWGMLTVCTPSQPGSHTLRPRSFPSPTKCLRCTSLMLGLGRQGLGCDTCGYFCHSACASQAPPCPVPPELLRTALGVHPETGTGTAYEGFLSVPRPSGVRRGWQRVYAALSDSRLLLFDAPDPRGSLASGVLLQALDLRDPQFSATPVLAPDVIHAQSKDLPRIFRVTASQLTVPPTTCTVLLLAENEGERERWLQVLGELQRLLLDARPRPRPVYTLKEAYDNGLPLLPHALCAAVIDQERLALGTEEGLFVIHLHSNDIFQVGDCRRVQRLAVSSAAGLLAVLCGRGPSVRLFALDELESAEVAGAKIPESRGCQALVAGRILQARTPVLCVAVKRQVLCYQLGPGPGPWQRRIRELQAPAPVQSLGLLGDRLCVGAAGTFALYPLLNEAAPLALGTGLVAEELPASRGGLGEALGAVELSLSELLLLFATAGVYVDSAGRKSRSHELLWPAAPTGWGYTAPYLTVFSENALDVFDVRRAEWVQTVPLKKVRPLNPEGSLFLYGTEKVRLTYLRNPLAEKDEFDIPDLTDNSRRQLFRTKSKRRFFFRVSDELRQQQRREMLKDPFVRSKFISPPTNFNHLVHVGPTEGRPNTRDGTRAQEQKSRGARSSGPQRPHSFSEAFRRPVSTGSDGLPGETDPLKRKPWTSLSSESVSCPQGSLSPAASLIQVSERPRSLPPDPESESSP

SEQ ID NO: 116 - protein, 1713 aa, Mus musculus
MSAKVRLKKLEQLLLDGPWRNDSALSVETLLDVLVCLYTECSHSALRRDKYVAEFLEWAKPFTQLVKDMQLHREDFEIIKVIGRGAFGEVAVVKMKNTERIYAMKILNKWEMLKRAETACFREERDVLVNGDCQWITALHYAFQDENYLYLVMDYYVGGDLLTLLSKFEDKLPEDMARFYIGEMVLAIDSIHQLHYVHRDIKPDNVLLDVNGHIRLADFGSCLKMNDDGTVQSSVAVGTPDYISPEILQAMEDGMGKYGPECDWWSLGVCMYEMLYGETPFYAESLVETYGKIMNHEERFQFPSHVTDVSEEAKDLIQRLICSRERRLGQNGIEDFKKHAFFEGLNWENIRNLEAPYIPDVSSPSDTSNFDVDDDMLRNIEILPPGSHTGFSGLHLPFIGFTFTTESCFSDRGSLKSMTQSNTLTKDEDVQRDLENSLQIEAYERRIRRLEQEKLELSRKLQESTQTVQSLHGSTRALGNSNRDKEIKRLNEELERMKSKMADSNRLERQLEDTVTLRQEHEDSTHRLKGLEKQYRLARQEKEELHKQLVEASERLKSQTKELKDAHQQRKRALQEFSELNERMSELRSLKQKVSRQLRDKEEEMEVAMQKIDSMRQDLRKSEKSRKELEARLEDAAAEASKERKLREHSESFCKQMERELEALKVKQGGRGPGAASEHQQEISKIRSELEKKVLFYEEELVRREASHVLEVKNVKKEVHDSESHQLALQKEVLMLKDKLEKSKRERHSEMEEAIGTVKDKYERERAMLFDENKKLTAENEKLCSFVDKLTAQNRQLEDELQDLASKKESVAHWEAQIAEIIQWVSDEKDARGYLQALASKMTEELETLRSSSLGSRTLDPLWKVRRSQKLDMSARLELQSALEAEIRAKQLVQEELRKVKDSSLAFESKLKESEAKNRELLEEMQSLRKRMEEKFRADTGLKLPDFQDSIFEYFNTAPLAHDLTFRTSSASDQETQASKMDLSPSVSVATSTEQQEDMARPQQRPSPVPLPSTQALAMAGPKPKAHQFSIKSFPSPTQCSHCTSLMVGLIRQGYACEVCAFSCHVSCKDSAPQVCPIPPEQSKRPLGVDVQRGIGTAYKGYVKVPKPTGVKKGWQRAYAVVCDCKLFLYDLPEGKSTQPGVVASQVLDLRDEEFAVSSVLASDVIHATRRDIPCIFRVTASLLGSPSKTSSLLILTENENEKRKWVGILEGLQAILHKNRLKSQVVHVAQEAYDSSLPLIKAVLAAAIVDGDRIAVGLEEGLYVIELTRDVIVRAADCKKVYQIELAPKEKIAILLCGRNHHVHLYPWSSFDGAEASNFDIKLPETKGCQLIATGTLRKSSSTCLFVAVKRLILCYEIQRTKPFHRKFSELVAPGHVQWMAVFKDRLCVGYPSGFSLLSIQGDGPPLDLVNPTDPSLAFLSQQSFDALCAVELKSEEYLLCFSHMGLYVDPQGRRSRMQELMWPAAPVACSCSPTHVTVYSEYGVDVFDVRTMEWVQTIGLRRIRPLNSDGSLNLLGCEPPRLIYFKNKFSGTILNVPDTSDNSKKQMLRTRSKRRFVFKVPEEERLQQRREMLRDPELRSKMISNPTNFNHVAHMGPGDGMQVLMDLPLSAAPTVQEEKQGPTPAGLPRQPPSRSKPYVSWPSSGGSEPGVPVPLRSMSDPDQDFDKEPDSDSTKHSTPSNSSNPSGPPSPNSPHRSQLPMEGLDQPSCDA

SEQ ID NO: 117 - protein, 1321 aa, Mus musculus
MKSRREKLLIPALTLDLSPSSQSPCLLSPGSPCSPCSPSLGLQPWSCRSGNRKSLVVGTPSPTLSRPLSPLSVPTAGNSPLDSPRNFSAAAAISFPFARRADGRRWSLASLPSSGYGTNTPSSTVSSSSSSRERLHQLPFQPTADELRFLSKHFRSSESVVDEDGGRSPRLRPRSRSLSPGRTSGTFDNEIVMMNHVYRERFPKATAQMEGRLQDFLAAFAPGDRLALADGVLGFIHHQIVELARDCLAKSGEALVTSRYFLEMQDKLERLLQDAHERSDSAEVGFIVQLVRKLLIIISRPARLLECLEFDPEEFYHLLEAAEGQAREDQGVKTDLPRYIIRQLGLAKDPLEEIQPLNDLDESQPPAPGSPESRGLGGPSRRKPCESDFETIKLISNGAYGAVYLVRHRDTRQRFAIKKINNQNLILRNQIQQVFVERDILTFAENPFVVGMFCSFETRRPLCMVMEYVEGGDCATLLKNMGPLPVDMARMYFAETVLALEYLHNYGIVHRDLKPDNLLITSLGHIKLTDFGLSKIGLMSMATNLYEGHIEKDAREFVDKQVCGTPEYIAPEVIFRQGYGKPVDWWAMGVILYEFLVGCVPFFGDTPEELFGQVVSDEIMWPEGDEALPLDAQDLITRLLRQSPMDRLGTGGTHEVKQHPFFLALDWAGLLRHKAEFVPQLEAEDDTSYFDTRSERYRHLGSEDDETNDEESSTEIPQFSSCSHRFSKVYSSSEFLAVQPTPTFAERSFSEDREDGWGQSLGDRGRRLSADLRLRSWTPASSCQPSSCQTDRGPSPSLLSTISLDVMPKFAFSSEDEGASSGPADPQKPVFILGEPDPPPPTTPVTPKPCNLSADTAVLSHARLRSNSTGARHSTPRPLDAGRGRRLGGSRDPGPEKPRASPGGSGGRVPKSASVSALSLIITADDGSGGPLMSPLSPRSLSSNPSSRDSSPSRDPSPVCGSLRPPIVIHSSGKKYGFSLRAIRVYMGDSDVYTVHHVVWSVEEGSPAQEAGLRAGDLITHINGESVLGLVHMDVVELLLKSGNKISLRTTALENTSIKVGPARKNVAKGRMARRSKRSRRRETQDRRKSLFKRISKPSSVLHTSRSFSSGLQHSLSSSESLPGSPTHSLSPSPTTPCRSPAPDAPTDTASPPNVSPSSSSPASPATGHTRPSSLHGLAAKLGPPRHKSGRRKSTSSIPPSPLACPPVPTPPPRSPSPLPGHIPIPARSPRLRRGQSADKLGLGTSERLDGDGGRRARGAEAELVVMRRLHLSERRDSFKKQEAVQEVSFDEEPGPPRGVPKIAVQGAEATPGTPGHARKD

SEQ ID NO: 118 - protein, 1570 aa, Mus musculus
MSDSLWTALSNFSMPSFPGGSMFRRTKSCRTSNRKSLILTSTSPTLPRPHSPLPGHLGSSPLDSPRNFSPNTPAHFSFASSRRADGRRWSLASLPSSGYGTNTPSSTVSSSCSSQERLHQLPYQPTVDELHFLSKHFGSTESITDEDGGRRSPAVRPRSRSLSPGRSPSSYDNEIVMMNHVYKERFPKATAQMEEKLRDFARAYEPDSVLPLADGVLSFIHHQIIELARDCLTKSRDGLITTVYFYELQENLEKLLQDAYERSESLEVAFVTQLVKKLLIIISRPARLLECLEFNPEEFYHLLEAAEGHAKEGHLVKTDIPRYIIRQLGLTRDPFPDVVRLEEQDSGGSNTPEQDDTSEGRSSTSKAKKPPGESDFDTIKLISNGAYGAVYLVRHRDTRQRFAMKKINKQNLILRNQIQQAFVERDILTFAENPFVVGMFCSFETRRHLCMVMEYVEGGDCATLLKNIGALPVEMARMYFAETVLALEYLHNYGIVHRDLKPDNLLITSMGHIKLTDFGLSKMGLMSLTTNLYEGHIEKDAREFLDKQVCGTPEYIAPEVILRQGYGKPVDWWAMGIILYEFLVGCVPFFGDTPEELFGQVISDDILWPEGDEALPTDAQLLISSLLQTNPLVRLGAGGAFEVKQHSFFRDLDWTGLLRQKAEFIPHLESEDDTSYFDTRSDRYHHVNSYDEDDTTEEEPVEIRQFSSCSPRFSKVYSSMEQLSQHEPKTPVSASGASKRDPSAKGPEEKVAGKREGLGGLTLREKTWRGGSPEIKRFSASEASFLEGEASPPLGARRRFSALLEPSRFTAPQEDEDEARLRRPPRPSSDPPSSLDTRVPKEAVQGEGTSTPGEPEATERSHPGDLGPPSKDGDPSGPRATNDLVLRRARHQQLSGDLAVEKRPSRTGGKVIKSASATALSVMIPAVDPHGGSPLASPMSPRSLSSNPSSRDSSPSRDYSPAVSGLRSPITIQRSGKKYGFTLRAIRVYMGDSDVYSVHHIVWHVEEGGPAQEAGLCAGDLITHVNGEPVHGMVHPEVVELILKSGNKVAVTTTPFENTSIRIGPARRSSYKAKMARRNKRPSAKDGQESKKRSSLFRKITKQSNLLHTSRSLSSLNRSLSSSDSLPGSPTHGLPARSPTHSYRSTPDSAYLGASSQSSSPASSTPNSPASSASHHIRPSTLHGLSPKLHRQYRSARCKSAGNIPLSPLAHTPSPTQASPPPLPGHTVGSSHTTQSFPAKLHSSPPVVRRRPKSAEPPRSPLLKRVQSAEKLGASLGADKKGALRKHSLEVGHPDFRKDFHGELALHSLAESDGETPPIEGPGATRQVAVRRLGRQESPLSLGADPLLPDGVQRPMASSKEDSAGGTEACTPPRATTPGSRTLERDSGCTRHQSVQTEDGPGGVARALAKAALSPVQEHETGRRSSSGEAGTPPVPIVVEPARPGVKTQAPQPLGTDSKGLKEPVAQMPLMPDAPRGRERWVLEEVEERTTLSGLRSKPASPKLSPDPQTPTLVPTKNVPRSAAPSVPPASLMVPGTKPEAGLNSRCPAEAVTPAGLTKTGAPSPASLGP

SEQ ID NO: 119 - protein, 1129 aa, Mus musculus
MKRGEKPEGYRQMRPKTFPASNYPGSSRQMLQEIRESLRNLSKPSDASKAEHNLNKMSTEDPRQVRNPPKFGTHHKALQEIRNSLLPFANETSSSRSPSEVNPQMFQDLQAAGFDEDMVIQALQKTNNRSIEAAVEFISKMSYQDPRREQMSAAAARPINATMKPGNVQHSINRKQSWKGSKESLVPQRHGPSLGENVVYRSESPNSQADVGRPLSGSGIAAFAQAHPSNGQRVNPPPPPQVRSVTPPPPPRGQTPPPRGTTPPPPSWEPSSQTKRYSGNMEYVISRISPVPPGAWQEGYPPPPLTTSPMNPPSQAQRAISSVPVGRQPIIMQSTSKFNFTPGRPGVQNGGGQSDFIVHQNVPTGSVTRQPPPPYPLTPANGQSPSALQTGASAAPPSFANGNVPQSMMVPNRNSHNMELYNINVPGLQTAWPQSSSAPAQSSPSGGHEIPTWQPNIPVRSNSFNNPLGSRASHSANSQPSATTVTAITPAPIQQPVKSMRVLKPELQTALAPTHPSWMPQPVQTVQPTPFSEGTASSVPVIPPVAEAPSYQGPPPPYPKHLLHQNPSVPPYESVSKPCKDEQPSLPKEDDSEKSADSGDSGDKEKKQITTSPITVRKNKKDEERRESRIQSYSPQAFKFFMEQHVENVLKSHQQRLHRKKQLENEMMRVGLSQDAQDQMRKMLCQKESNYIRLKRAKMDKSMFVKIKTLGIGAFGEVCLARKVDTKALYATKTLRKKDVLLRNQVAHVKAERDILAEADNEWVVRLYYSFQDKDNLYFVMDYIPGGDMMSLLIRMGIFPENLARFYIAELTCAVESVHKMGFIHRDIKPDNILIDRDGHIKLTDFGLCTGFRWTHDSKYYQSGDHPRQDSMDFSNEWGDPSNCRCGDRLKPLERRAARQHQRCLAHSLVGTPNYIAPEVLLRTGYTQLCDWWSVGVILCEMLVGQPPFLAQTPLETQMKVIIWQTSLHIPPQAKLSPEASDLIIKLCRGPEDRLGKNGADEIKAHPFFKTIDFSSDLRQQSASYIPKITHPTDTSNFDPVDPDKLWSDGSEEENISDTLSGWYKNGKHPEHAFYEFTFRRFFDDNGYPYNYPKPIEYEYIHSQGSEQQSDEDDQHTSSDGNNRDLVYV

SEQ ID NO: 120 - protein, 946 aa, Mus musculus
MAGDAVQSEPRSWSLLEQLGLAGADLAAPGVQQQLELERERLKREIRKELKLKEGAENLRRATTDLGRSLAPVELLLRGSARRLDLLHQQLQELHAHVVLPDPAAGSDATQSLAEGSPICSSTNLSRVAGLEKQLAIELKVKQGAENMIQTYSNGSSKDRKLLLTAQQMLQDSKTKIDIIRMQLRRALQALQAGELESQAAPDEAQGDPELGAVELRIEELRHHFRVEHAVAEGAKNVLRLLSGAKAPDRKAVSEAQEKLTESNQKLGLLRESLERRLGELPADHPKGRLLREELTAASSSAFSAILPGPFPATHYSTLSKPAPLTGTLEVRVVGCKNLPETIPWSPPPSVGASGTPESRTPFLSRPARGLYSRSGSLSGRSSLRGEAENATEVSTVLKLDNTVVGQTAWKPCGPNAWDQSFTLELERARELELAVFWRDQRGLCALKFLKLEDFLDNERHEVQLDMEPQGCLVAEVTFRNPIIERIPRLQRQKKIFSKQQGKAFQRARQMNIDVATWVRLLRRLIPSAVATGTFSPNASPGAEIRHTGDISMEKLNLGADSDSSSQKSPPGLPSTSCSLSSPTHESTTSPELPSETQETPGPGLCSPLRKSPLTLEDFKFLAVLGRGHFGKVLLSEFRSSGELFAIKALKKGDIVARDEVESLMCEKRILAAVTRAGHPFLVNLFGCFQTPEHVCFVMEYSAGGDLMLHIHSDVFSEPRAVFYSACVVLGLQFLHEHKIVYRDLKLDNLLLDTEGYVKIADFGLCKEGMGYGDRTSTFCGTPEFLAPEVLTDTSYTRAVDWWGLGVLLYEMLVGESPFPGDDEEEVFDSIVNDEVRYPRFLSAEAIGIMRRLLRRNPERRLGSTERDAEDVKKQPFFRSLGWDVLLARRLPPPFVPTLSGRTDVSNFDEEFTGEAPTLSPPRDARPLTAAEQAAFRDFDFVAGGY

SEQ ID NO: 121 - protein, 395 aa, Mus musculus
MGAVSCRQGQHTRVSAPQKGDNIQGHWVQGWKSLWCGMGTIRSGLEELWGLQRHQCLHQELLQPAPLLLEKPQSEWPVPQFISLFLPEFPVRPVREQQELKILGLVAKGSFGTVLKVLDCAQKAVFAVKVVPKVKVLQRDTLRQCKEEVSIQRQINHPFVHSLGDSWQGKQHLFIMCSYCSMDLYSLWSTVGWFPEDSIRLFAAELVLVLCYLHDLGIIHRDVKMENILLDERGHLKVTDFGLSRHLSQGARAYTICGTLQYMAPEVLSGGPYNHTADWWSLGVLLFSLATGKFPVAAERDHVAMLASVAHCESEIPASINQELSLLLHELLCQNPLHRLRYLHHFQVHPFFRGVAFDPELLQKQPVNFVMEKQDTWPSPLESMSFEDFDYDLES

SEQ ID NO: 122 - protein, 1056 aa, Mus musculus
MTSPWGHSADLARFYTVTEPQRHPRGYTVYKVTARVVSRRNPEDVQEIIVWRRYSDFKKLHRELWQIHRNAFRHSELFPPFAKGTVFGRFDKTVIEERRQCAEDLLQFSANIPALYNSRQLQDFFKGGVISDGSELIGPAEAYPDSPANAFPECGTEGFSSDSDLLSLTVDADSLAEVDDGMASRQGSPSRTFGLSLSTDSSAVGAVASDSEPSRVEDRESRSLFPSSLKPRLGRRDYLEKAGELIKLALKKEEEDDYEAASDFYRKGVDLLLEGVQGESSPTRREAVKRRTAEYLMRAESICSLRAAPQLHTGPQPPGSLSSRPPWSLRSPAEELKAFRVLGVIDKVLLVMDTRTEQTFILKGLRKSSECSRNRKTIIPRCVPNMVCLHTYIISEESVFLVLQRAEGGKLWSYISKFLNRSSQESLDIKEGRPSMPPRVCLQQPSASPQGGSSFESRGSDTGSMLKALPLKTSLTPSSQDDSNQEDDGQPSSPKWLDSGSSSEDECTAGYLTLCNEYGQEKMDLVSLSEESVMQPEGDKADTQAVSSPASLATGSVSPSTHLRVFSGGEDLEAVSSPPTSESLSRSKNSPMEFFRIDSKDSTSELLGLDFGEKLHSLKPEPLKALFTLEDGDSPSQSLDPGESKRESEAQDSVSRGSDDSVPVISFKEAAAEAISGAEEGRPDLLVNLPGELQPTKEASAMDPKFSQASAGRLDSKLLEAPDVLCLRLSSEQCHGLGPEGPEELSDPTEFCPGGVIPEHDAQADPGVLFEAAVDHRSSPDQFLFSSLRSESDRLGQVEVVVTAQALQESLFHISSPCSGANKEHSAYADTATSEEVLLFTEPTKEEANSLFQRDSEAQERGVGAGEADKEIHQIFEDLDKRLAASSRFFIPEGCIQRWAAEMVVALDALHREGIVCRDLNPNNILLNDGGHIQLTYFSRWSEVEDSCDSDAVARMYCAPEVGAVTEETEACDWWSLGAVLFELLTGKTLVECHPAGINTHTTLNMPGCVSEEARSLIQQLLQFNPMERLGAGVAGVEDIKSHPFFTPVDWAELTR

SEQ ID NO: 123 - protein, 533 aa, Mus musculus
MWLELGAMLRRTCGPLGRAVRLPCGGALGPRPHWWGPCRSCLAQSVHQDQPGRGLSEDDIRRAREARLRKAPRPQLSDRSRERKVPASRISRLASFGGLAVGLGLGALAEVTKKSLPGGSLQHEGVSGLGSSPFLSEANAERIVQTLCTVRGAALKIGQMLSIQDNSFISPQLQRIFERVRQSADFMPRWQMMRVLEEELGKDWQDKVASLEEVPFAAASIGQVHQGLLKDGTEVAVKIQYPGVAQSIQSDVENLLALLKMSVGLPEGLFAEQSLQTLQQELAWECDYCREAACAQTFRKLLADDPFFRVPAVVQELCTTRVLGMELAGGIPLDQCQGLSQDIRNQICFQLLRLCLRELFEFRFMQTDPNWANFLYDASSHQVTLLDFGASRAFGTEFTDHYIEVVKAAADGDRDRVLQKSQDLKFLTGFETKAFSDAHVEAVMILGEPFAASGPYDFGAGETARRIQGLIPVLLRHRLRPPPEETYALHRKLAGAFLACARLHAHIACRDLFQDTYHRYWASRQTLPLPAAS

SEQ ID NO: 124 - protein, 582 aa, Mus musculus
MWRPMRLCHFHSTLLQSRQKPWPCPAIFFRRNFKSPPARTSRARLLWRRALSATVVGTPFLLGAYYFMAEASERRKLRLAVDGIGRFGRSVKIGLFISTDYWWCTNVVLRGVEENSPKYVEIMSACHQRAADTLVAGAIRNGGLYVKLGQGLCSFNHLLPTEYIQTLRVLEDKALTRGFREVDELFLEDFQALPNELFQEFDYEPMAAASLAQVHRAKLHDGTDVAVKVQYIDLRDRFDGDVQTLELLLRLVELMHPSFGFSWVLQDLKGTLVQELDFENEGRNAERCAQELKHFHYVVIPRVHWDRSSKRVLTADFCNGCKVNDMEGIKSQGLAVQDVAKKLIQTFAEQIFHTGFIHSDPHPGNVLVRKGPDGKAELVLLDHGLYQFLDEKDRSSLCQLWRAIILRDNAAMKKHAAALGVQDYMLFSEVLMQRPVRLGQLWGSHLISREEAAYMQDMAREHFDGIMEVLKALPRPMLLVLRNINTVRAINSNLGTPVDRYFLMAKSAVWGWSRLVGAAYQGIYGSSLLRHIKVLWEALKFEMALRLEILAMRLTALMLRVLVRLGFAPKAEAEEVYQYLEM

SEQ ID NO: 125 - protein, 1672 aa, Mus musculus
MDKVETEASVKPLSGGSDKTEVKQGLESLARERTDEKYPGSKKAALRPTRARRPGMKANTKKQLLRDSAPKGTLDLLPKEPTRQPLPGSYGQEPTHTEAGAPGWDSHFHAEVCIPLPAEQDSKILRPPADPLSKEEDSSFEGGGALLNKLFEASQIPDRTDHLQMQIQETIGESSSLDQMLAFSVPAEESSTFAGATTHSVSNLSEINRENLSLAQYPGLESCPQSLQQEGRPNRDRDLPGALWAESACELSLLEDNEEEESQPPASVALPQGDGVPCREPEGLSDSFPQPTAPSLPLENVGSGSRVREAAGGVGCFEAGDQETCYATMDLLVGAPVDKYLPQEICPEDLELTEGQSEVCDLCSPDKILAVLQTQGSEPPRSTDKRSQDGKSAEGLLFNSTFTWDTAKEASEDAVGETAADVENPPSTFSSTLPYSERGFGETQPLCSETISFVKDSEGSYRSSSLSIPAAIDTLASYSSDRECSKEQSAESTANVDCHQVTREMEGISTNAAEVHEIKCHSVSVPQDNDFDVGADQVSCEARDEDNSQSLPDDDSQSGRSLSSSTGEATGETLVPAPSSAGDHGHFSMPEGQGLCSRALQMDNQPVCQSQAMEGAHSRGLEEHFQEKGSGMKHGIRPQSTSHQVSLSANDFQEILPSIPTMQQETNVEPLEHSLADSREEIECSSDPRTSDLVVAEKTVGEDSHLVVSVPALPDILLGEKDDVGLGSWAVGGKVKIITLEAPVFEIWPPELVRHPGYKEAEAGLTMPGRSWALSDILRAGATRSEPGALGGAAWVPSPQADALMALGANRDTWLGAAPDRQANCNCLSSQCLSQPRFLESSVDPVEDKELEVTDSPSEVSKTGEMEMPETLNEEQEETQQILRHPAVVNQSVNFPRILESSVDPIDDRGELEGVWPEKPEPSDSSVEGNEFIVGNTCQRVDIQPASLQLPHPQDSGEIIPYEHTTNQNRVDGERAEAKTSLPDKAKAEAEAVVWQAQGPGEEGQGIPSVCSMSQTQDGGDRSLGEAGQRGTDETEVISPLSPLSSCLTGVTHTCVKAETNNSTGHIYGGSEPRTRQSVIPMKTEKGTIESKCGNHVRSSDDLTNTPCTSSPKGNVTRLSISHGLEELKSEKLQIAETKPLNSSDSPTMTLALISGECESEKDPKSLLRRDPCPKGSTLDSGKKSRDQQQKPVAAQVSKAPGDQSAMAGSEEGKKKQEASGSGHLTAGIKKKILSRVAALRLRLEEKENSRKNSIVKKTPKFERSLSRTDEKRDPKRAPCKAEGKAPVLLKRIQAEMAPEHSGNIKLSCQFSEIHEDSTVCWTKDSKSIAQAKKSAGDNSSVSLAIVQAGQKDQGLYYCCLKNSYGKVTAEFNLTAEVLKQLSSHTEYRGCEEIEFSQLIFKEDVFNDSYFGDHLRGQISTEELHFGEGVHRKAFRSKVMQGLMPVFQPGHACVLKVHNAVAHGTRNNDELVQRNYKLAAQECYVQNTARYYAKIYAAEAQPLEGFGEVPEIIPIFLIHRPENNIPYATVEEELIGEFVKYSIRDGKEINFLRRDSEAGQKCCTFQHWVYQKTSGCLLVTDMQGVGMKLTDVGIATLARGYKGFKGNCSMTFIDQFRALHQCNKYCKMLGLKSLQNNSQKPKKPIVGKGRVPTNATQVKTPESETPPAERKT

SEQ ID NO: 126 - protein, 1231 aa, Mus musculus
MNNQDAVASILHECKQVLDRLLLETPDVSTEDKSEDQRCRASLPSELRTLIQEAEEMKWPFVPEKWQYKQAMSPEDKTNLQDVIGAGLQQLLAALRASILVQDCAAASAIVFLMDRFLYGLDVSGKLLQVAKGLHKLKPATPIAPQVVIRQARVSVNSGKLLKAEYILSSLISNNGATGTWLYRNESDKVLVQSVCIQIRGQILQKLGMWYEAAELIWASVIGYLTLPQPDKKGISTSLGILADIFVSMSKTDYEKFKKSPKVNLALLKEFDHHLLSASEACKLAAAFSAYTPLFVLTAVNIRGTCLLSYSCSADCPPGMKSVHLCEAKEAFEIGLLTKKDGELVSGKQELHSFIKAAFGLTTVHSRLHGETDAVRAARQLCSEAVGKLYTFSTSPTSQDREGLSQEIMSLISQVKGHLRVQSFPNLDACSYVPESFKCGLDRLILHGHVDFQQILETYSQHHTSVCEVFESTCGNSKRNQRDTKSEVCITTLKTETNTADTMVATLERVSSQDSRSTASSKMSKKDQGKLQRERGRSWTHSKAFRVSLDLDMETETEPPNHSNGGTDVFNKSLRDNSSSCSWGRLSGLSSSTSWEEVNCAVQDVVRKGSGQEEHPVEAQSSEAASEEPKRNRSSRAVYLSSKLRGVSLQTTGDDNLESSPSQLHNHTSILPFNAKDTCLASGAGLVETAEGSSNTSLQSSHSCGSDSWSLSSSDRFTDVTTNPSVQEEEPSGIMGDVPESKYDCKDWHGEKNGGTLAEICTGPELTSAPSSVDPEGETAESTDDGLSPSQVALGCLEGSHSMSTRRTFFPDGSVQNADSAKTGCSVRDQTVDPDASTVDEEGQMLDSTEICSIGQDGAHRPRALRSGQSAEGPKSFVNGSSPSPIFDEDFSTTEEGEELGSMLKSSQNSSSYSPWWLKSPAFSRSSSDGESSWSLLNSSRSSFASLAGQTSQEILEARTLQPDDLEKLLAGVRHDWLLQRLENTGVLKSNQLQQAHSALLLKYSKKSELWTAQETVVYLGDYLKVKKKGKQRNAFWVHYLHQEETLGRYVGKEYKERKGLRHHFTDVERQMTAQHYVTEFNKRLYEQKIPTQIFYIPSTILLILEDRTIKGCISVEPYILGEFVKLSNNTKAVKNEYKATEYGLAYGHFSYEFSNHRDVVVDLQGWVTGNGKGLIYLTDPQIHSVDQKDVTTNFGKRGIFYFFNNQHASCNEICHRLSLTRPSLEQTSKV

SEQ ID NO: 127 - protein, 1270 aa, Mus musculus
MVDSVGFAEAWRAQFPDSEPPRMELRSVGDIEQELERCKASIRRLEQEVNQERFRMIYLQTLLAKEKKSYDRQRWGFRRAAQPPDGAAEPRASAPRPPPAPADGADPAPVEESEARPDGEGSPSKGRSASARRPAAAASADRDDRGPPTSVAALRSNFEKIRKGPAQPGSADAEKPFYVNVEFHHERGLVKVNDKEVSDRISSLGSQAMQMERKKSQQSAGQGLGEAPRPHYRGRSSESSCGLDGDYEDAELNPRFLKDNLINANGGNRPPWPPLEYQPYQSIYVGGMMVEGEGKSPLLRSQSTSEQEKRLTWPRRSYSPRSFEDSGGGYTPDCSSNENLTSSEEDFSSGQSSRVSPSPTTYRMFRDKSRSPSQNSQQSFDSSSPPTPQCQKRHRQCQVVVSEATIVGVRKTGQIWPSDGDSTFQGEADSSFGTPPGYGCAADQAEEQRRHQDGLPYIDDSPSSSPHLSSKGRGSLASGALDPTKVSELDLEKGLEMRKWVLSGILASEETYLSHLEALLLPMKPLKAAATTSQPVLTSQQIETIFFKVPELYEIHKEFYDGLFPRVQQWSHQQRVGDLFQKLASQLGVYRAFVDNYGVAMETAEKCCQANAQFAEISENLRARSNKDVKDSTTKNSLETLLYKPVDRVTRSTLVLHDLLKHTPSSHPDHSLLQDALRISQNFLSSINEEITPRRQSMTVKKGEHRQLLKDSFMVELVEGARKLRHIFLFTDLLLCTKLKKQSGGKTQQYDCKWYIPLTDLSFQMVDELEALPNIPLVPDEELDALKIKISQIKSDIQREKRANKGSKVMERLRKKLSEQESLLLLMSPSMAFRVHSRNGKSYTFLISSDYERAEWRESIREQQKKCFKSFSLTSVELQMLTNSCVKLQTVHHIPLTINKEDDESPGLYGFLHVIVHSATGFKQSSNLYCTLEVDSFGYFVNKAKTRVYRDTTEPNWNEEFEIELEGSQTLRILCYEKCYNKMKMTKEDGESADKLMGKGQVQLDPQTLQDRDWQRTVIDMNGIEVKLSVKFTSREFSLKRMPSRKQTGVFGVKIAVVTKRERSKVPYIVRQCVEEIERRGMEEVGIYRVSGVATDIQALKAAFDVNNKDVSVMMSEMDVNAIAGTLKLYFRELPEPLFTDEFYPNFAEGIALSDPVAKESCMLNLLLSLPEANLLTFLFLLDHLKRVAEKETVNKMSLHNLATVFGPTLLRPSEKESKLPANPSQPITMTDSWSLEVMSQVQVLLYFLQLEAIPAPDSKRQSILFSTEV

SEQ ID NO: 128 - protein, 2635 aa, Mus musculus
MGDHGLELASMIPALRELASATPEEYNTVVQKPRQILCQFIDRILTDVNVVALELVKKTDAQPTSVMLLDFIQHIMKSSPLMFVNVNGSQGQNEAKDSCIEFSHWIITRLLRIAATPSCHMLHKKICEVICSLLFLFKSKNPAIFGVLTRELLYLFEDLIYLHKRNAVGEVMEWPVVVSRFLSRLDEHMGCLQPAPLQFMNVQNVEFIEVTLLMVLIHIVPTVFFRRQELLLWQIGCALLEHGSPKIRSLAISLLTELFELGGLPAQPASTFFSLFLELLQHLVGMDADQLKLYEEPLSKLLKTLFPFEAEAYRNIEPVYLNVLLEKLSVMFEDRVLMRLKSDLLKAALCHLLQYFLTFVPAGYESALQVRKVYVTNICRALVDALGVQKHVGYLLGPFYAALKMESKEIIERIQCQAQQENLSGNNDEVSPKRRKLSSSLSSYKKPSRQPEEIIHVDMDKKSILWNVLKQKAESLQISLECGTLKNSVAEALEGITVVLQLTALCTVHCSHQDMDGHNVKDHQHKYKKKPPVVVTWMSLDFYTKVLKSCRSLLESVQKLELELVIDSMVRICDALMYMQVKSSFKDHVLEELCGMLSLPWIYSYSDDNSLKMTTFATNLLPLSQRVWDSYSPQAQSKCVFLLTLFPRRIFLEWRTAVYNWALKSSHEVIRASCVKGFFILLHQQNSCNQIPKMLVDRVKDDSDMVKKEFASVLGQLVCTLHGMFYLSSSVEPCFEHMDLFSKNLKATSQHECSSSQVKASTCKPFLFLLTKNTPSPVKLAFIDNLHHLCKHLDFQEDEREVKAVLGTLLNLMEDPDKDVRIAFSGNIKYILESLNSEDGFVKELFVLRMKEAYTHAQIARNNELKDTLILTTGDIGRAAKGDLIPFALLHLLHCLLSKSASVSGAAYTEIRALVAAKSVKLQNFFSQYKKPICQFLVESLHSSQMTALPSAPCQSSEIRKQDVAHHREMALNTLSEIANVFDFPDLNRFLTRTLQVLLPDLAAKASPAASALIRTLGKQLNVSRREILINNFKYIFSHLVCSCSKDELERALHYLKNETEIELGSLLRQDFQGLHNELLLRIGEHYQQVFNGLSILASFASSDDPYQGPRDITSPELMADYLQPKLLGILAFFNMQLLSSSVGIEDKKMALTSLMSLMKLMGPKHVSSVRVKMMTTLRTGLRFKDDFPELCCRAWDCFVRCLDHAYLGPLLSHVIVALLPLIHMQPKETAAIFHYLIIENRDAVQDFLHEIYFLPDHPELEKIKAVLQEYRKETSETTDLQTTLQLSMKAIQHENVDVRIHALTSLKETLYKNQEKLIKYATDSETVEPVISQLVTVILKGCQDANSQARLLCGECLGELGAIDPGRLDFSTTETQGKDFTFVTGVEDLSFAYGLLMELTRAYLAYADNSRAQDSAAYAIQELLSIYDCREMQSNGPGYQLWKRFPEHVREILEPHLNTRYKSSQKSTDWSGVTKPIYLSKLGNNFAEWSSSWAGYLITKVRDNLASKIFTCCSIMMKHDFKVTIYLLPHILVYVLLGCNQEDQQEVYAEIMAVLKHDEQHAISTQDSASDLCQLSTQTVFSVLDHLTQWARHKFQALNAEKLAQNKPKGVSNVNFEDYQSVTRFLDLIPQDTLAVASFRSKAYTRAVMHFESFITEKKQNIQKHLGFLQKLYAAMHEPDGVAGVSAIRKAEPSLKEQILEHESIGLLRDATACYDRAIQLEPDQIIHYHGVVKSMLGLGQLSTVITQVNGVHANRSEWTDELNTYRVEAAWKLSQWDLVENYLAADGKSTTWSVRLGQLLLSAKKRDTTTFYDTLKLVRAEQIVPLSAASFERGSYQRGYEFIVRLHMLCELEHSLKPLFRKSPGDSCNEDSLNWGARLEMTQNSYRAKEPILALRRALLSLNKRPDYNEMVGECWLQSARVARKAGHHQTAYNALLNAGESRLAELYVERAKWLWSKGDVHQALIVLQKGVELCFPENKSPSESKHMLIHGRATLLVGRFMEETANFESNAVMKKYKDVTLFLPEWEDGHFYLAKYYDKLMPMVTDNKMEKQGDLIRYIVLHFGRSLQYGNQFIYQSMPRMLSLWLDFGAKAYEWEKGGRSDRLQMRNDLAKINSVLTEHTNRLAPYQFLTAFSQLISRICHSHDEVFVVLMEIIAKVFLAYPQQAMWMMTAVSKSSYPMRVNRCKEILTKAIHMKKSLEKFVGDATRLTDKLLELCNKSVDGSNSTLSMSTHFKMLKRLVEDPTFSEILIPLQSVMIPTLPSVLGAHANHDPFPGHWAYLAGFDDVVEILSSLQKPKKISLKGSDGKFYIMMCKPKDDLRKDCRLMEFNSLINKSLRKDAESRRRELHIRTYAVIPLNDECGIIEWVNNTAGLRPILTKIYKEKGVYMTGKELRQCMLPKSAALSEKLKVFQELLLPRHPPVFHEWFLRTFPDPTSWYSSRSAYCRSTAVMSMVGYILGLGDRHGENILFDSFTGECVHVDFNCLFNKGETFEVPEIVPFRLTHNMVNGMGPMGTEGLFRRACEVTLRLMRDQREPLMSVLKTFLHDPLVEWSKPVKGHSKAPLNETGEVVNEKAKTHVLDIEQRLQGVIKTRNRVTGLPLSIEGHVHYLIQEATDENLLCQMYLGWTPYM

SEQ ID NO: 129 - protein, 550 aa, Mus musculus
MATAEKQKHDGRVKIGHYILGDTLGVGTFGKVKVGKHELTGHKVAVKILNRQKIRSLDVVGKIRREIQNLKLFRHPHIIKLYQVISTPSDIFMVMEYVSGGELFDYICKNGRLDEKESRRLFQQILSGVDYCHRHMVVHRDLKPENVLLDAHMNAKIADFGLSNMMSDGEFLRTSCGSPNYAAPEVISGRLYAGPEVDIWSSGVILYALLCGTLPFDDDHVPTLFKKICDGIFYTPQYLNPSVISLLKHMLQVDPMKRAAIKDIREHEWFKQDLPKYLFPEDPSYSSTMIDDEALKEVCEKFECSEEEVLSCLYNRNHQDPLAVAYHLIIDNRRIMNEAKDFYLATSPPDSFLDDHHLTRPHPERVPFLVAETPRARHTLDELNPQKSKHQGVRKAKWHLGIRSQSRPNDIMAEVCRAIKQLDYEWKVVNPYYLRVRRKNPVTSTFSKMSLQLYQVDSRTYLLDFRSIDDEITEAKSGTATPQRSGSISNYRSCQRSDSDAEAQGKPSDVSLTSSVTSLDSSPVDVAPRPGSHTIEFFEMCANLIKILAQ

SEQ ID NO: 130 - protein, 71 aa, Mus musculus
MASHMEENILEKDFRMLSSLGCGSFGEVKLACHLPTLIRVAVKVLEKNINSMADITSKLELLQSLEHRNIV

SEQ ID NO: 131 - protein, 177 aa, Mus musculus
KIIYIILEHLICWELLGRVVEFSNLQEKEYHRLFKQMTYALQYCHQKRNAHRDLKPKNILVDSKGIKQKIIMIHKLATFKQISHFYAPGHFEGKDYDGHAVAVRRSGVALYFMLRGCFPFQKIILRTEAEVIAKKYIVKFKLSSELGNMIANMITIDSGQRPTVHDIVRFEWLNYDY

SEQ ID NO: 132 - protein, 492 aa, Mus musculus
  misc_feature (55)..(55): Xaa can be any naturally occurring amino acid
  misc_feature (440)..(440): Xaa can be any naturally occurring amino acid
MASNSKKKSLESQYRVLFYLGEGTFGTVKLALHLKTEALVAVKMIEVNEKTLKGXILVEQEILATLNHPNIIRLFQVILTPGCVNFILEYASGGNLFDLIQEHGPLQEEEAKHIFGQLVASVKYCHNLNIVHRDIKPQNVLLDEERNVKLTDFGLAIKCNPGRLLSRKCGTKRFWAPEILLGEPYDSRKTDVWSLGVLLFFITTGDYPFAGSTLIEFEQKLTTGSYCIPPYISVKLENLIHQILTVPPEKRPSIEDIEKHPWVTKCDVTVPTDSFPDYTIIEMLCGMGFEANKILESLQKKKFDENMGTYLLLKEQVGKGIEYTPTPSPKPVDLCPAPPPSPAHTSGLPQKRRASEPNFGLVCIWPSGQQRPAALPLSGQKLTRSDSMPPIALYFPEKKSTTPSCAIYTGAVAAPWISDILLEDETSLPPEEDVTMETSXPPKKIGFFRRLRNRLRNCLSRLCCIPRAPETNTQRRSSKKVAPLKEVGCRPR

SEQ ID NO: 133 - protein, 492 aa, Mus musculus
  misc_feature (55)..(55): Xaa can be any naturally occurring amino acid
  misc_feature (122)..(123): Xaa can be any naturally occurring amino acid
MASNSKKKSLESQYRVLFYLGEGTFGTVKLALHLKTEALVAVKMIEVNEKTLKGXILVEQEILATLNHPNIIRLFQVILTPGCVNFILEYASGGNLFDLIQEHGPLQEEEAKHIFGQLVASXXKYCHNLNIVHRDIKPQNVLLDEERNVKLTDFGLAIKCNPGRLLSRKCGTKRFWAPEILLGEPYDSRKTDVWSLGVLLFFITTGDYPFAGSTLIEFEQKLTTGSYCIPPYISVKLENLIHQILTVPPEKRPSIEDIEKHPWVTKCDVTVPTDSFPDYTIIEMLCGMGFEANKILESLQKKKFDENMGTYLLLKEQVGKGIEYTPTPSPKPVDLCPAPPPSPAHTSGLPQKRRASEPNFGLVCIWPSGQQRPAALPLSGQKLTRSDSMPPIALYFPEKKSTTPSCAIYTGAVAAPWISDILLEDETSLPPEEDVTMETSPPKKIGFFRRLRNRLRNCLSRLCCIPRAPETNTQRRSSKKVAPLKEVGCRPR

SEQ ID NO: 134 - protein, 304 aa, Mus musculus
  misc_feature (72)..(72): Xaa can be any naturally occurring amino acid
  misc_feature (178)..(178): Xaa can be any naturally occurring amino acid
MVVLDLKVMAPKEAPFRNSYRILNTIYQGSFGKIKVACHLLTQTQVALKVLPKNSSIFMSEIDIMKSLNHLXLYQIINTTVSTYLVMERMIGGGVFYLQSEFQDSQGYTEKPCLEKQTNKQQQQQQGTVHRDLRPEDILADGEGNIKFSDFGFGIQVSPGKKLHSFFATSHFAFQSSXGGKDYDGPAAAMWSLGVLFYFVTTGCFPFQAPTNLSIKQKIPRAKYYGLPYLSANVLKVIGQLLTLDPSKRAIGIASCTTGGFCKEELSFEFSLEEFLSLPNPIIMIIMANLGYDPYEVFKITNLQ

SEQ ID NO: 135 - protein, 477 aa, Mus musculus
MDSHMEENILEKDFRMLLSLGCGSFGEVKLACHLPTRIRVAVKVLEKNINSMADITSKVELLQSLEHRNIVRFFHMIDTLTTTYVIMEYVPGEDLEKYLRALGCLKEEEARPVFQQVVSAVYFLQQRHIAHRNIKLENILVDAARNAKLSDFGMAIKTTEGQMLEETCDSLLYRAPEILARKPYDGLAVDMWSLGIVLYVLVTGHFPYVEATIEYMHRIITTTMCHSIPKHLSIPCHIIIARLLMVPTWYRMTIHQLVEQPWLGHIQDHGLVSTKEILPRIVNTMCTIGYSCEEIVSSLTHRRLKDEVMATFNILKYQLSYEDSHQQVEKLWANSSPSGTLIPLPHLKRRASEPTFSTCIEARKSHFQDESVERRSKSSRSYPTLTKSSCTEMMPNSDDPVPESDALTADVTNSATGDIVVNRDSTDSMLGEQVSSVSAPIGPTASRSRSPTVWKQNSRALKAPCCCCCCCCLPSPW

SEQ ID NO: 136 - protein, 238 aa, Mus musculus
  misc_feature (56)..(56): Xaa can be any naturally occurring amino acid
MSRELEASFHEGDTLAQDYYILGTLGKGSFARVKLALHFMTHTLVAIKMLKRGKNXSDFLVISEIQIMKSLHHRHILQLLQVFQTRHKTYLVMEYASRGSLLKYIKKRRPLDEEEACTMFSELSLAVNYIHSQNIAHQDIKAENILLDWDGHVKLTDFGISKRLASGEKFKGFCGTAQYCAPEVFNDTQYGGLPSDIWSLGMVLYIGHLPFQGTTHSNIKYMILSQSWWIPYRLSPEL

SEQ ID NO: 137 - protein, 474 aa, Mus musculus
  misc_feature (75)..(75): Xaa can be any naturally occurring amino acid
  misc_feature (128)..(128): Xaa can be any naturally occurring amino acid
MASHMEENILEKDFRMLLSLGCGSFGEVKLACHLPTRIRVAVKVLEKNINSMADITSKVELLQSLEHRNIVRFFXMIDTLTTTYVIMEYVPGEDLEKYLRALGCLKEEEARPVFQQVVSAVYFLQQKXIAHRNIKLENILVDAARNAKLSDFGMAIKTTEGQMLEETCDSLLYRAPEILARKPYDGLAVDMWSLGIVLYVLVTGHFPYVEATIEDMHRIITTTMCPIPYHLSFPCHIIIARLLGVPTWFRMTIHQLVERPWLGHIQDHGLVATKEILPRIINTMCTIGYTCEEIVSSLTNRRLKDEVMATFNILKYQLSYGDSHQQVEKPWANNSLSGVLIPFPHLKRRASESTFSTCIEARKSHFQDENIERRSKSCINSPILTQNCPERMPNSDDPVPESDALTADVTNSATGDIVVNIDSTDCMPGEPVSPVSDYVGPTASKSRSLTVWRRISRALKALCCCCCCCLPSPR

SEQ ID NO: 138 - protein, 306 aa, Mus musculus
  misc_feature (101)..(101): Xaa can be any naturally occurring amino acid
  misc_feature (242)..(242): Xaa can be any naturally occurring amino acid
ITDYKMMMTLGEESFSVVKMAYDIATLTCVAIKHLRKVKSITPPITREISIMKSLTHPNIIKLFQVVQTRETNYLVMEHASEGDLLDRILECGFLEESKAXECLARYYKQCSIANDIVHRDIKASNILIDYWWNAKLCDFGLAAKVFPGQKLVDFCGLLPYCAPEFFQAEEYEGCPVTIWSLGVLLFVTECLPFLGRSFAKLRRQITAANFSIPPHVSTVIFNVIVEILMINHSRRPTIHQXMLHPMISNSQVVSPPTWTFPGSRSSSIVKTMRVMGYKPEDIIESLIDQKFNEVMSTYLILQYQT

SEQ ID NO: 139 - protein, 232 aa, Mus musculus
MFLLDPLLLPIFLASLGVVDTDHKTIDLSAMMKRWQARQDLRSNTFGELAVTEHYKILTTLGQGSFGEVKLASHLLTKIKVAIKILPQSRRNPLVQSEIEIMKSLDHPHIIKVLHIIDTTRNIFIVLEHAMGGELLSRIEKFGYIAEKECHRLFSQIVYALKYCHKKGIDHRGDVKLADFGLGTKIIMGQKLVEFCGTLPYCAPEMLEGRGYDGWATESPNTFFLNRHVEVG

SEQ ID NO: 140 - protein, 50 aa, Mus musculus
MTSYFQNKNLVRQYRMLSSIGQGEFGTINLACHRKIRVLVMIKSIEISEK

SEQ ID NO: 141 - protein, 121 aa, Mus musculus
MLFFYSYCKFDSIQTMDDETGYEALIQYCIEENVTTNYKMLTTLGEGNFSVVKQAFHIPTLTSVTVKTLQDTKKYTSVICMEARIMKSLSHPNNIKLIHVVQRRKTTYLVIEYASEGELLD

SEQ ID NO: 142 - protein, 178 aa, Mus musculus
NYKMMTTLSEGNFLVVKLDFHVPTFTTVSAKILQNTKYALVIRREARIMKSLSHPNIIKLFHVVQRREATYLVMEYASEGELQDRVIKVGSLEESETRRLFAQIVHAVQYCHGHHIVHTDIKASNILIDCRGNAKLCDFDLAAEVIPGQKLAGFCGTLPRTPICRGISGPPMDIWSSS

SEQ ID NO: 143 - protein, 617 aa, Mus musculus
MFLLDPLLLPIFLASLGVVDTDHKKIDLSAMMKRWQACQNLRSNTFGEVALTEHYKILTTLGQGSFGEVKLASHLLTNIKVAIKILPQSRRNPLVQSEIEIMKSLDHPHIIKVLHIIDTTRNIFIILEHAVGGELLSRIEKFGYIGEKDCHRLFSQIVYALKYCHEKGIVHRDLKPENILLAHRGDVKLADFGLGTKIIMGQKLVEFCGTLPYCAPEMLEGRGYDGRATDVWSLGVVLYFMATGRLPFEGYSYEATKQKIFAGRYPRSFSLSPELWDVIDNLLTVNPGDRPTVHEITRFKWTNHDNEASPASLGENTESHPDPSIIVLMGVLGYNPGEIRESLREKKFDMVMATYLLLQQQQQQQQQQQLPQENKTTKRPDPKPRDRMLKNTEPTIKNQTAVRRATSMPTHSTLSLPNEWESFEKGKRTTMSHSMPPTWKCFKKHTTPLNSISPQLVQKAQYMRPIWETEISDTSEEMSTGESLEYPNLMGQAHYMRPIWETEISYTSEEMSTGESLEYPNLMGQVHIMTRAASMDIMYTQVTSPPFSRKEAKGEGPAIQQRESRPSSTNTLQGHLHGSCQTAPQAPFQRRVWKTIRNGFLRGLRTLCCCLHQSSAP

SEQ ID NO: 144 - protein, 411 aa, Mus musculus
MCGPKSELTGRSTLSYENLRAQYNILKTIGQGSYAQVKLAHHRLTGTAVAIKVLLKQNIQNCPVCTEVGIMKRMDHPNIISLHQVIETEQNVFLILELADGHELFDWIVETGFLHEGLARKIFRQIVHAMCYCHDIGIVHRDLKPDNIMVDSTGKVKIIDFGLGALVKPGMKLSRCCGAVLFYPPEIFLGRPYDGTKVDTWTLGVLLYFMVTGKLPFRGKSYKEIEAKVLLGRYDVPYHLSKELRQIIRYLLTVNPTERPTLKNIMEHSWLRQRNASSSSHSHKMDPSYPDPAIMAAMAAMGFDPLDVQKSLLNKLYNEPMATYGLLQCQARQQDDYTSLPKPVQPGITPFPTLTDPTNFRCYQRRTTNNPAIRIFFSSCSKTDSSKAQRACKAEAKKKCHCTCNTAPVPT

SEQ ID NO: 145 - protein, 520 aa, Mus musculus
MRVGVELERNIMASHMEENILEKDFRMLTSLGCGSFGEVKLACHLPTRIRVAVKVLEKNINSMAEITSEVELLQSLEHRNIVRFFHMIDTLTTTYMIMEYVAGEDLEKCLRALGCLKEEEARPVFQQIVSAVHFLHQRRIAHRDIKLENILVDAAGNAKLCDFGMAIKTTEGQMLEETCGSVFYWAPEILARKPYDGLAVDMWSLGIVLYVLVTGHFPYVEATIEDMHRVITTTMCPIPYHLSFPCHIIIARLLMVPTWYRMTIHQLVERPWLGHIQDHGLVATKEILPRIVNTMCTIGYTCEEIVSSLTNRRLKDEVMATFNILKYQLSYGDSHQQAKKHWANSSPSGALIPLPHLKRRSSEPTLSTCTEVRKRHFQDVGVERRGKSCRNYPMFIKYSCTERMPCSYDPVPESDALTADVTNSATGDIAVNKDSMDSMLGEHVSPVSAQDETSTGFLNMGFYAEEPFTWSEISSDEPHVGPIAPGSRSLKVWKRISCSQKTICCCYRCCCCCCCLPTPR

SEQ ID NO: 146 - protein, 261 aa, Mus musculus
  misc_feature (80)..(80): Xaa can be any naturally occurring amino acid
CKVGSSQVIEGLMMEQDLKMMEQDLKACYSIEENFDTNYKMLNTLGEGNFSVVKRAFHVPTSTSVAVKILQNTKVRYTSXPICREARIMKSLSHPNIIKLFHVVQRRETTYLVMEYASEGELLDCIINVGSLEESETRRLFAQIVHAVQYCHDHHIVHRDIKASNILIDCRGNAKLCDFGLAAEVIPGQKLAGFCGTLPYCAPELLQAEKYEGPPCRYLEFRGPPGSSWYLGTCLSKGKSFVDLKQEIISANFRHPFPCSH

SEQ ID NO: 147 - protein, 476 aa, Mus musculus
MASNSKKKRLGSQYRVLSYLGEGAYGTVKLALHLKTEALVAIKMVEISQKTIDVILAELEVLKTLNHPNIIRLFQVLLTSSHVNFILEYASGGSLLDLIEEHGPLQEEEAKKIFGEILAAVKYCHNIDIIHGDIKPENILIDEKGNMKLTDFGLAIKLSPGRLLSQRRGTKSFWAPELMLGEPYNGRKTDIWSLGVLLYFITTGHYPFAGITFKEIKNKITTGSYRIPSYTSVKLENLIHQILTVTPEKRPSIEDIERHPWVRKCDVTVPTDSFPDYTIIDMLCGMGFDANKILESLQKKKFDENMGTYLLLKEQVGKGIKHTSTFSPKYVDPCPVPPPSPAHTSTSGLPRKRRGSEPNFGLLHIWPSGQQGPAALPLSGHKLARSVSMPPIALHFPERKSITPSCALHTGAVAAQSVCNIILEDETCLPPEEDVTMETSSPPSEDWVLQKTAQSTQELPRKALLHPPGSRDKHRA

SEQ ID NO: 148 - protein, 514 aa, Mus musculus
MLFSGTTSSDSMPAHIEEELPPPSPQLIKPEDGELYSQYNVVRTIGHRTYAKVLLAQHRLTGTPVAVKVLVKNKPWFQPGMKEANLMKKIKHPNIVSLLQVIETKSRGYLIMELVEGQELYEYIKNSGHIEEDEARQIFLQILSAVSYCHRHGIVHRDLKPDNIMIDNKGNTKIIDFGLSTQVKAGDLLDEPCGAYAFGAPELFLWERYDGRKSDLWALGVILYYMVVGKVPFDSVTIPELAGVYPAPCGVSDELEDLLSLLMTVNPKYRPTVTEVMKHPWLKGHWKGLKNIHEEPFPVRPDPDIVDAIQYIGFQAKDIRESLTKEKFNEVSAAYYLLERQALQREVRSTQAPTVSQVKAPFPSMDAGAASCLKIKRSGSAPILGRSVCPSSIGRVPAYGQKVRQRAGRRSTGHGLVFRPNQMTPTQDQHHIRAMSVPCMLSPSSISEESVSEKREENLSHSALAEDKPICSRGCRRGIMRWTRRVGNAIRTLCCCIPSRKKPRLGQSRVSPQK

SEQ ID NO: 149 - protein, 71 aa, Mus musculus; identical to SEQ ID NO: 130

SEQ ID NO: 150 - protein, 658 aa, Mus musculus
MEGAAVSAAGDGPAVETGLPGSPLEAVAGATAAPVEPRKPHGVKRHHHKHNLKHRYELQETLGKGTYGKVKRATERFSGRVVAIKSIRKDKIKDELDMVHIRREIEIMSSLNHPHIISIYEVFENKDKIVIIMEYASKGELYDYISERRRLSERETRHFFRQIVSAVHYCHKNGVVHRDLKLENILLDDNCNIKIADFGLSNLYQKDKFLQTFCGSPLYASPEIVNGRPYRGPEVDSWALGVLLYTLIYGTMPFDGFDHKNLIRQISSGEYREPTQPSDARGLIRWMLMVNPDRRATIEDIANHWWVNWGYKSSVCDCDALPDSESPLLARIIDWHHRSTGLQAEAEAKMKGLAKPGASEVVLERQRSLKKSKKENDFPQSGQDSVPESPSKLSSKRPKGILKKRSNSEHRSHSTGFIEGIVSPALPSPFKMEQDLCRTAIPLPSSPEADMSGKLSLKQSATMPKKGILKKTQQRESGYYSSPERSESSELLDSNDVVISGGLSSPPPDPARGTSHSLSCRRKGILKHSSRYSDGGTDPALTRPEMPTLESLSPPGVPSDGISRSYSRPSSIISDDSVLSSDSFDLLELQENRPARQRIRSCVSAENFLQLQDFETPHNRPRPQYLKRLADSSFSLLTDMDDVTQVYKKALEICSKLN

SEQ ID NO: 151 - protein, 1356 aa, Mus musculus
VAGAGGAGPAGRLLPPPAAGPPAAPAAVPPAAVPARPTAPASRGSMAARIGYYEIDRTIGKGNFAVVKRATHLVTKAKVAIKIIDKSQLDEENLKKIFREVQIMKMLCHPHIIRLYQVMETERMIYLVTEYASGGEIFDHLVAHGRMAEKEARRKFKQIVTAVYFCHCRNIVHRDLKAENLLLDANLNIKIADFGFSNLFTPGQLLKTWCGSPPYAAPELFEGKEYDGPKVDIWSLGVVLYVLVCGALPFDGSTLQNLRARVLSGKFRIPFFMSTECEHLIRHMLVLDPNKRLSMEQICRHKWMKLGDADPNFDRLIAECQQLKEERQSDPLNDDVLLAMEDMGLDKERTLQSLRSDAYDHYSAIYSLLCDRHKKHKTLRPGALPSMPQAMTFQAPVNLQAEQTGTAMNLSVPQVQLINPENQIIEPDGAVNLDSDEGEEPSPEALVRYLSMRRHTVGVADPRTEVMEDLQKLLPGFPGVNPQGPFLQVAPNMNFTHNLLPMQSLQPTGQLEYKEQSLLQPPTLQLLNGMGPLGRRASDGGANIQLHAQQLLKRPRGPSPLVTMTPAVPAVTPVDEESSDGEPDQEAVQRYLANRSKRHTLAMTSPTAEIPPDLQRQLGQQSFRSRVWPPHLVPDQHRSTYKDSNTLHLPTERFSPVRRFSDGAASIQAFKAHLEKMGNSSSIKQLQQECEQLQKMYGGQVDERTLEKTQQQHMLYQQEQHHQILQQQIQDSICPPQPSPPLQVACENQPALLTHQLQRLRIQPSSPPPNHPSNHLFRQPSNSPPPVSSAMITSHGATSPSQFQGLPSHGAIFQQQPENCSPPPSVALTCLGLQQASQSQPVTIQLQEPVDMLSNMAGTAAGSAGRSIPISPSASQIQIQHRASLMAPFSYGHRPLSKQLSADSAEAHSLNMNRFSPANYDQAHLHPHLFSDQSRGSPSSYSPSTGVGFPPTQALKVPPLDQFPTFPPSAQQQPPHYTTSALQQALLSPTPPDYPRHQQVPHILQGLLSPRHSLTGHSDIRLPPAEFAQLIKRQQQHRQQQQQQQQQQEYHELFRHMNQGDAVSLAPSLGGQNMTEQQALSYQNADSYHRHHTSPQHILQIRAQDCISQGPSPTPTHGYAHQPPLMHSESMEEDCLCEGLKEGFPDKSSSTLTKGCHNSPLLLCTSGPGDPEPLLGTVSQARELGIHPYGHQPTATTFSRNKVPSRESVLGNCLERSSPGQAMELPDHNGLGYPVRPLVSEHLRSRTLQRHHTIQNSDDAYVQLDTLPGMSLVAGKALSSARMSDAVLSQSSLMGSQQFQDEEDEECGVSLGHEHPGLGDGSQHLNSSRYPATCVTDIMLSHKHPEVSFSMEQAGV

SEQ ID NO: 152 - protein, 745 aa, Mus musculus
MSFGRDMELEHFDERDKAQRYSRGSRVNGLPSPTHSAHCSFYRTRTLQTLSSEKKAKKVRFYRNGDRYFKGIVYAISPDRFRSFEALLADLTRTLSDNVNLPQGVRTIYTIDGLKKISSLDQLVEGESYVCGSIEPFKKLEYTKNVNPNWSVNVKTTSASRAVSSLATAKGGPSEVRENKDFIRPKLVTIIRSGVKPRKAVRILLNKKTAHSFEQVLTDITDAIKLDSGVVKRLYTLDGKQVMCLQDFFGDDDIFIACGPEKFRYQDDFLLDESECRVVKSTSYTKIASASRRGTTKSPGPSRRSKSPASTSSVNGTPGSQLSTPRSGKSPSPSPTSPGSLRKQRISQHGGSSTSLSSTKVCSSMDENDGPGEGDELGRRHSLQRGWRREESEEGFQIPATITERYKVGRTIGDGNFAVVKECIERSTAREYALKIIKKSKCRGKEHMIQNEVSILRRVKHPNIVLLIEEMDVPTELYLVMELVKGGDLFDAITSTSKYTERDASGMLYNLASAIKYLHSLNIVHRDIKPENLLVYEHQDGSKSLKLGDFGLATIVDGPLYTVCGTPTYVAPEIIAETGYGLKVDIWAAGVITYILLCGFPPFRGSGDDQEVLFDQILMGQVDFPSPYWDNVSDSAKELINMMLLVNVDQRFSAVQVLEHPWVNDDGLPENEHQLSVAGKIKKHFNTGPKPSSTAAGVSVIALDHGFTIKRSGSLDYYQQPGMYWIRPPLLIRRGRFSDEDATRM

SEQ ID NO: 153 - protein, 459 aa, Mus musculus
MVQKRTAELQGFHRSFKGQNPFELAFSLDLAQHRDSDFSPQCEARPDMPSSQPIDIPDAKKRGRKKKRCRATDSFSGRFEDVYQLQEDVLGEGAHARVQTCVNLITNQEYAVKIIEKQLGHIRSRVFREVEMLYQCQGHRNVLELIEFFEEEDRFYLVFEKMRGGSILSHIHRRRHFNELEASVVVQDVASALDFLHNKGIAHRDLKPENILCEHPNQVSPVKICDFDLGSGIKLNGDCSPISTPELLTPCGSAEYMAPEVVEAFSEEASIYDKRCDLWSLGVILYILLSGYPPFVGHCGSDCGWDRGEACPACQNMLFESIQEGKYEFPDKDWSHISFAAKDLISKLLVRDAKQRLSAAQVLQHPWVQGCAPENTLPTPLVLQRNSCAKDLTSFAAEAIAMNRQLAQCEEDAGQDQPVVIRATSRCLQLSPPSQSKLAQRRQRASLSATPVVLVGDRA

SEQ ID NO: 154 - protein, 1950 aa, Mus musculus
MSGQLPGKTMGDVKLFASSHMSKTSHSVDPSKVSSMPLTEAPAFILPPRNLCVKEGATAKFEGRVRGYPEPQVTWHRKGQAITNGGRFLLDCGVRGTFSLVIHTVREEDKGKYTCEASNGSGARQVTVELTVEGNSMKKRDQPVLSKASGFPGETRPSIWGECPPKFATKLGRAVVKEGQMGRFSCKITGRPPPQVTWLKGNVPLQPSARVSMSEKNGMQILEIRGVTRDDLGVYTCMVVNGSGKASMSAELSIPGLDNAARLAVRGTKAPSPDIRKEVTNGVSKDPETVAESKNCPSPQRSGSSARATNSHLKSPQEPKPKLCEDAPRKVPQSSILQKSTSTITLQALKVQPEARVPAIGSFSPGEDRKSLAAPQQATLPTRQSSLGGSVGNKFVTGNIPRESQRESTFPRFESQPQSQEVTEGQTVKFICEVSGIPKPDVGWFLEGIPVRRREGITEVYEDGVSHHLCLLRARTRDSGRYSCTASNSLGQVSCSWSLLVDRPNLAQTAPSFSSVLKDSVVIEGQDFVLRCSVQGTPAPRVTWLLNGQPIQFAHSICEAGVAELHIQDALPEDRGTYTCLAENAMGQVSCSATVTVQEKKGEGEREHRLSPARSKPIAPIFLQGLSDLKVMDGSQVTMTVQVSGNPPPEVIWLHDGNEIQESEDFHFEQKGGWHSLCIQEVFPEDTGTYTCEAWNSAGEVRTRAVLTVQEPHDGTQPWFISKPRSVTATLGQSVLISCAIAGDPFPTVHWLRDGRALSKDSGHFELLQNEDVFTLVLKNVQPWHAGQYEILLKNRVGECSCQVSLMLHNSPSRAPPRGREPASCEGLCGGGGVGAHGDGDRHGTLRPCWPARGQGWPEEEDGEDVRGLLKRRVETRLHTEEAIRQQEVGQLDFRDLLGKKVSTKTVSEDDLKDIPAEQMDFRANLQRQVKPKTISEEERKVHSPQQVDFRSVLAKKGTPKTPVPEKAPPKAATPDFRSVLGGKKKSPSENGGNSAEVLNVKAGESPTPAGDAQAIGALKPVGNAKPAETPKPIGNAKPTETLKPVGNTKPAETLKPIANAQPSGSLKPVTNAQPAEPQKPVGNAKSAETSKPAGKEEVKEVKNDVNCKKGQVGATGNEKRPESQGSAPVFKEKLQDVHVAEGEKLLLQCQVISDPPATVTWSLNGKTLKTTKFIVLAQEGSRFSVSIEKALPEDRGLYKCVAKNSAGQAECSCQVTVDDAQTSENTKAPEMKSRRPKSSLPPVLGTESDATVKKKPAPKTPTKAAMPPQIIQFPEDQKVRAGEPVELFGKVAGTQPITCKWMKFRKQIQESEHIKVENGESGSKLTILAARQEHCGCYTLVVENKLGSRQAQVNLTVVDKPDPPAGTPCASDIRSSSLTLSWYGSSYDGGSAVQSYNVEIWDTEDKVWKELATCRSTSFNVQDLLPDREYKFRVRAVNVYGTSEPSQESELTAVGEKPEEPKDEVEVSDDDEKEPEVDYRTVTVNTEQKVSDVYDIEERLGSGKFGQVFRLVEKKTGKIWAGKFFKAYSAKEKDNIRQEISIMNCLHHPKLVQCVDAFEEKANIVMVLEIVSGGELFERIIDEDFELTERECIKYMRQISEGVEYIHKQGIVHLDLKPENIMCVNKTGTRIKLIDFGLARRLENAGSLKVLFGTPEFVAPEVINYEPIGYATDMWSIGVICYILVSGLSPFMGDNDNETLANVTSATWDFDDEAFDEISDDAKDFISNLLKKDMKNRLDCTQCLQHPWLMKDTKNMEAKKLSKDRMKKYMARRKWQKTGNAVRAIGRLSSMAMISGLSGRKSSTGSPTSPINAEKLESEDDVSQAFLEAVAEEKPHVKPYFSKTIRDLEVVEGSAARFDCKIEGYPDPEVVWFKDDQSIRESRHFQIDYDEDGNCSLIISDVCGDDDAKYTCKAVNSLGEATCTAELIVETMEEGEGEEGGEEEEEEEE

SEQ ID NO: 155 - protein, 36946 aa, Mus musculus
MWEAPYAVGKRGKSLLDDEKTFANPFQVGEPLAKVPEKMTTQAPMFTQPLQSVVVLEGSTATFEAHVSGSPVPEVSWFRDGQVISTSTLPGVQISFSDGRARLMIPAVTKANSGRYSLRATNGSGQATSTAELLVTAETAPPNFSQRLQSMTVRQGSQVRLQVRVTGIPTPVVKFYRDGAEIQSSLDFQISQEGDLYSLLIAEAYPEDSGTYSVNATNSVGRATSTAELVVQGEEVVPAKKTKTIVSTAQISETRQTRIEKKIEAHFDARSIATVEMVIDGATGQLPHKTPPRIPPKPKSRSPTPPSIAAKAQLARQQSPSPIRHSPSPVRHVRAPTPSPVRSVSPAGRISTSPIRSVKSPLLIRKTQTTTMATGPEVPPPWKQEGYVASSTEAEMRETTMTSSTQIRREERWEGRYGVQEQVTISGAAAAAASASVSSSFTAGAITTGTKEVKQETDKSAAVATVVAAVDMARVREPAISAVEQTAQRTTTTAVHIQPAQEQARKEAEKTAVTKVVVAADKAKEQELKSRTREVMVTTQEQTHISHEQIRKETEKAFVPKVVISATKAKEQETRITGEITTKQEQKRITQETIRQETEEIAASMVVVATAKSTKLEAAVGVQEETAIQQDQMHLTHEQMMKETRKTVVPKVIVATPKIKEQDLVSRSREAITTKRDQVQITQEKKRKEVETTALSTIAVATAKAKEQETVLRSREAMATRQEHIQVTHGQVGVGKKAEAVATVVAAVDQARVREPREPTHVEESHSQQTTLEYGYKEHISTTKVPEQPRRPASEPHVVPQAVKPAVIQAPSETHIKTTDQMGMHISSQVKKTTDISTERLVHVDKRPRTASPHFTVSKISVPKTEHGYEASIAGSAIATLQKELSATSSTQKITKSVKAPTVKPGETRVRAEPTPSPQFPFADMPPPDTYKSQAGIEVKKEVGVSISGSTVREEHFEVLRGREAKVTETARVPAPAEVPVTPPTLVSGLKNVTVIEGESVTLECHISGYPSPKVTWYREDYQIESSIDFQITFQGGIARLMIREAFAEDSGRFTCSAVNEAGTVSTSCYLAVQVSEEFDKETTLTEKFATEEKRFVESRDVVMTDTSITEEQAGPGEPAAPFFISKPVVQKLVEGGSVVFECQIGGNPKPHVYWKKSGVPLTTGYRYKVSYNKQTGECRLVISMTFADDAGEYTIVIRNKHGETSASASLLEEADYEALVKTQQEMLYQTQMSTFIQEPKVGEIAPGFAYSEYEKEYEKEQALIRKKMAKDTVMVRTFVEDQEFHISSFEERLIKEIEYRIIKTTLEELLEEDGEEKMAVDISESEAIESGFDIRIKNYRILEGMGVTFHCKMSGYPLPKIAWYKDGKRIRHGERYQMDFLQDGRASLRIPVVLPEDEGIYTAFASNIKGNAICSGKLYVEPAAPFSAPTYMPTPEAVSRIRSVSPRSLSRSPIRMSPAMSPARMSPARMSPARMSPARMSPGRRLEETDESQLERLYKPVFVLKPASFKCLEGQTARFDLKVVGRPMPETFWFHNGQQIVNDYTHKVVIKEDGTQSLIIVPASPSDSGEWTVVAQNRAGKSTISVTLTVEAVEHQIKPAFVEKLKNVNIKEGSRLEMKVRATGNPNPDIVWLKNSDIIVPHKYPRIRIEGTRGEAALKIDSIISQDSAWYTATAINKAGRDTTRCKVNVEVEFAEPEPERKLIIPRGTYRAKEIAAPELEPLHLRYGQEQWEEGDLYDKEKQQKPFFKKKLTSLRLKRFGPAHFECRLTPIGDPTMVVEWLHDGKPLEAANRLRMINEFGYCSLDYGAAYSRDSGVITCRATNKYGTDHTSATLIVKDEKSLVEESQLPDGKKGLQRIEELERMAHEGALTGVTTDQKEKQKPDIVLFPEPVRVLEGETARFRCRVTGYPQPKVNWYLNGQLIRKSKRFRVRYDGIHYLDIVDCKSYDTGEVKVTAENPEGVTEHKVKLEIQQREDFRSVLRRAPEPKPEFHVHEPGKLQFEVQKVDRPVDTSETKEVVKLKRAERITHEKVSEESEELRSKFKRRTEEGYYEAITAVELKSRKKDESYEELLKKTKDELLHWTKELTEEEKKALAEEGKITIPTFKPERIELSPSMEAPKIFERIQSQTVGQGSDAHFRVRVVGKPDPECEWYKNGVKIERSDRIYWYWPEDNVCELVIRDVTAEDSASIMVKAINIAGETSSHAFLLVQAKQLITFTQELQDVVAKEKDTMATFECETSEPFIKVKWYKDGIEVHAGDKYRMHSDRKVHFLSVLTIDTSDAEDYSCVLVEDENIKTTAKLIVEGAVVEFVKELQDIEVPESYSGELECIISPENIEGKWYHNDVELKSNGKYSITSRRGRQNLTVKDVTKEDQGEYSFVVDGKKTTCKLKMKPRPIAILQGLSDQKVCEGDIVQLEVKVSLENVEGVWMKDGQEVQHSDRVHIVIDKQSHMLLIEDMTKEDAGNYSFTIPALGLSTSGNVSVYSVDVITPLKDVNVIEGTKAVLECKVSVPDVTSVKWYLNDEQIKPDDRVQSIVKGTKQRLVINRTHASDEGPYKLMVGRVETSCNLSVEKIKIIRGLRDLTCTETQNVVFEVELSHSGIDVVWNFKGKEIKPSSKYKIEAHGKIYKLTVLNMMKDDEGEYAFYAGENTTSGKLTVAGGAISTPLTDQTVAESQEAVFECEVANPESEGEWLKDGKHLALSNNFRGESDGHKRRLVIAAAKLDDAGEYTYKVATSKTSAKLKVEAVKIKKTLRNLTVTETQDAVFSVELTHPDVKGVQWIKNGVVLDSNDKYEISVKGTLYSLKIKNCAMADESVYGFKLGRLGASARLHVETVKIIKKPKDVTALENATVTFEVSVSHDTVPVKWFHKNVEIKPSDKHRLVSERKVHKLMLQSISPSDAGEYTAMVGQLECKAKLFVETLHITKTMKSIEVPETKAASFECEVSHFNVPSMWLKNGVEIEMSEKFKIVVQGKLHQLIIMNTSTEDSAEYTFVCGNDQVSATLTVTPIMITSMLKDINAEEKDTITFEVTVNYEGISYKWLKNGVEIKSTDRCQMRTKKLTHSLNIRNVHFGDAADYTFVAGKATSTATLYVEARHIEFRKHIKDIKVLEKKRAMFECEVSEPDITVQWMKDGQELQIADRIKIQKEKYVHRLLIPSTRMSDAGKYTVVAGGNMSTANLFVEGRDVRIRSIKKEVQVIEKQRAVVEFEVNEDDVDAHWYKDGIEINFQVQERHQYVVERRIHRMFISETRHSDAGEYTFVAGRNRSSVTLYVNAPEPPQVLQELQPVTVQSGKPARFCAVISGRPQPKISWYKEEQLLSTGFKCKFLHDGQEYTLLLIEAFPEDAAVYTCEAKNDYGVATTSASLSVEVPEVVSPDQEMPVYPPAIVTPLQDTVTSEGRPARFQCQVSGTDLKVSWYCKDKKIKPSRFFRMTQFEDTYQLEIAEAYPEDEGTYAFVANNAVGQVSSTATLRLEGFSKSEEVTSKSQWHTSPSVSLKKEALGQKPIFIQPLSSLRVHSGETVRFHARVSGVPKPAIQWFHNHQPILPSKDVVFHFEESTGMALMLIVDAYPEHAGKYSCRAANSAGEATCAATLTVTAKAPESILHERIGQQIEMEMKEELFEGEADGSGDARGAFSDSEDIDHHSLMARRYANRTSSTSSWPEYFKPTFTQKLTFQYALEGEPIVFTCSLVAYPTPEMTWFHNNRPIPTGLRRVVRTETDLHQHSSSLEVKRVQGRDSGSYRFLAVNSEGSAESSASLHVIQKGQDERYLEFLKRAEQTWENTRGLGERREERIKVGLRFTGSPFNKKQDVEEKGMVRTIHFRSASPVRRADYVYNDEWSESKFDIRGCLSVGESFLDEETKMKLQRLREARKIFLEKKKLSLLEASSEVNSVTVRSEDIVGDAPLSREEGKRGFGREFAEDRHRVDNSAEGVIENPYSVPNQIHQNREPPSSVRATGDEDLQTENSPDQETFLEESLQKGYLCEHVLVGENLQAVEWFEESVTSTVIREPLPFTSNEEVHGYKSRGICESPDKVSQVLTPYPSESLDTFVDAKETEDVDSGGGTQRGWQEGQCHASTKVEEFKVEHEEKTRSFENYFQKHPQRCPPSFLQDIESQEVYEGDSCKFVCHFQGYPQPIVTWYNNEMPVPRSQGFTTHTFENYSTLTFPSVQPQHGGSVTCVLFNQYGTVKATSMLRVKAKPRYESQPHKVPVWPDYADEEEELALVFDQARRIHPSFSQERQEHLHMLKAHLPELPSADRELLSFPVEIQITAATPTPEQNKECRELFELEPEVTPRDQAIQSPKHKFIFSSDITNEPPKMLQEMPRSASCREGNSVMLECLISGEPQPVVMWFHNGVLVKPNQRFEMEEVNCSYRLYINDASSQDSGRYQCVAQNDSGIAESILDLTVEPITYREYSQLENESRIYAQYSKNQQTQVQGEPVRTHFYDHTVSPFAAQSNIKEYTIREYFQSLETVGELEKKNEVYCPTTVEKLSKSMQHASRPTDIEKPHRMEFLQCQDEEHIGERSQSLQAGATICPFVDDFSKANIRNKVSDDVGYHGPDWGNMKGHSQSDYVLNIHSKRTSNTVQDVEDSPVPTYEEALEEERYYPGKKVRHKVIAFEKLQRAERGVVEKRRTKKSFVTAPQKKWDNREFSLTQNEPGSSNMYRAEEVASHTEADSSNIIMDLKQLSSQAHEEFEIEERGRQEEILPLDQEKFELEAPVTFDLKQFHSQIESTGMNFQGLANGQQDKSSLKTQQPASEMANPEDVVFDLKQMYSHIEDPGEVFQGQETESKQETCHKEEISIYQSFQYAQEENTAILKPDHVPESFSEVIHGEARALFQTPSADVEEANVSETGASVENGDKTFISQLKRAASEEECLEDHEMEDGPTLKPAFGMTQGYEGTLENPRGAVHGAEVPHRRLSLSQDLPFLMTGEQQDLKEQLSESIEASGEETYHEVHVPSESSFSTMEGEKIEKSLLENLPRLEEAQTTKEGEYETSLTQYLLAEGRYEVPEVRDTKHKAQLVQSDSTTSMEVEEVTFNTVYEYYNQKQESVGRPYSPESDISIDVGSTSSEDLSELDQFYSPPSSVENLESPKSPDLYFKPSDRIEQPVANSRAEENGERYSTPSEGEIPERYSTPSGEALERYSTPPGEALERYSTPPGEALERYSTPPGEALERFSTPPGEALERFSTPPGEALERYSTPPGEALERFSTPPGEKLERGFIPTRGPNHARNVSRNLSELEREDSTANEHFHTPTDERSSPYETWRSDSFGTPNEAIEPKDNEMPPSFIEPLSRRKIYENTTLGFIIEVEGLPVPGVKWYRNKSLLEPDDRIKMERVGNVCSLEIANIQKGDGGEYLCHAVNIIGEAKSFAIVDVIPQEERAVALPPPVTHQHIMEFDVANSNSSRTPSPQEIVLEVELSEKDVKEFEKQVKIVTVPEFTPDHKSMIVSLDILPLSLVDPSAESQGQEGREFKIDLEAFEMPPRFITPICDFRIPENSSAVFKCSVIGIPPPEVRWYKEYMCIEPDDTKYVISEEKGSHSLRIQDVGPSDCATYRCRALNSAGEAICRGFLTMGDSQVSAVATRTSKVTLSSQKEELVLRSRYADSFFEFQVVDGPPRFIKGISDCHAPLGTAAYFQCLVRGSPRPTVSWYKDGKLVQGSRFSAEESGIGFHNLFITGLVKEIASLLSAEEDFQTYSSDLRLPNANETLELLSEPPARSTQFDSRQEGAAPVFIREISDVEISVEDVAKLSVTVTGCPKPKIQWFFNGMLLTPSADYKFVFDGDTHSLIILFTRFQDEGEYTCLASNEYGKAVCSAHLRISPRGERSTEMESGEKKALEKPKGPCPPYFFKELKPVHCGPGIPAVFEYSVHGEPAPTVLWFKEDMPLYTSVCYTIIHSPDGSGTFIVNDPQRGDSGLYLCKAQNLWGESTCAAELLVLPEDTDVPDASCKEESTLGVPGDFLETSARGPLVQGVDSRQEITAFAEGTISKAALIAEETLQLSYERSVDDSEVGTGVTIGAQKLPPVVLSTPQGTGELPSIDGAVHTQPGRGPPPTLNLQAVQAQTTLPKEATLQFEEPEGVFPGASSAAQVSPVTIKPLITLTAEPKGNYPQSSTAAPDHALLSSVAAETLQLGEKKIPEVDKAQRALLLSQSLAEGCVESLEVPDVAVSNMRSEPQVPFQHTCTEGKILMASADTLKSTGQDVALRTEEGKSLSFPLALEEKQVLLKEEQSEVVAVPTSQTSKSEKEPEAIKGVKEVREQELLSKETLFPSMPEEQRLHLKTQVRRALQAAVAREQANLFSEWLRNIDKVEVTAVNFTQEPKRILCTYLITSVSSLTEELTVTIEDIDPQMANLETGLKDALCSIVCEERNILMAEDPRIHEEDKIDVQGGRDHLSDAQKVETVIEAEADSKYLVSKEEVSWSKVESQLKDGDTNEVPQAETLKLAEESGTQKTSTEMSQEEAEGTLADLCPAVLKHLVDTISEEGDTVHLTSSISNAKEVHWYFKGNLVPSDGKFKCLKEQNAYTLVIEAVKTEDEGEYVCEASNDSGKAKTSAKLTVGERAAPVIKRRIEPLEVALGHLAKFTCEIQGAPNVRFQWFKAGREIYESDKCSIRSSNYVSSLEILRTQVVDCGEYTCKASNEYGSVSCTATLTVTEAYPPTFLSRPKALTTFVGKAAKFLCTVSGTPVIEIIWQKDGAALSPSPDCRVTDADNKHSLELSNLTVQDRGIYSCKASNKFGADICQAELTIIDKPHFIKELEAVQSAINKKIHLECQVDEDRKVTITWSKDGQKLPAGKDYKIYFEDKIASLEIPLAKLKDSGTYTCTASNEAGSSSSSAAVAVREPPSFVKKVDPSYLMLPGESARLHCKLKGSPVIQVTWFKNNKELSESNTVRMSFVNSEAILDITDVKVDDSGTYSCEATNDVGSDSCSTEVVIKEPPSFIKTLEPADIVRGANALLQCEIAGTGPFEVNWFKDKKQIRSSKKYRLFTQKTFVYLEISSFNSADVGDYECVVANEVGKCGCVATHLLKEPPTFVKKVDDFTALAGQTVTLQAAVRGSEPISVMWMKGQEVIKEDGKIKMSFSNGVAVLTIPDVQISLGGKYTCLAENEAGSQTSVGELIVKEPAKIIERAELIQVTAGDPATLEYTVSGTPELKPKWYKDGRPLVASKKYRISFKNNIAQLKFYSAELHDSGQYTFEISNEVGSSSCETTFTVLDRDIAPLFTKPLRNVDSVVGGACRLDCKIAGSLPMRVSWFKDGKELTASDRYQIAFVEGTASLEISRVDMNDAGNFTCRATNSVGSKDSSGALIVQEPPSFVTKPGSRDVLPGSAVCLKSAFQGSAPLTIKWFKGDKELVSGGSCYITKETSESSLELYAVKTSDSGTYTCKVSNVAGSVECSADLFVKEPATFIEKLEPSQLLKKGDGTQLACKVTGTPPIKITWFANDRELRESSKHKMSFAESTAVLRLTDVAIEDSGEYMCEAQNEAGSDHCTGIVIVKESPYFTKEFKSIEVLKEYDVMLLAEVAGTPPFEITWFKDNTTLRSGRKYKTFLQDQLVSLQVLKFVAADAGEYQCRVTNEVGSSTCSARVTLREPPSFIKKIEATSSLRGGTAAFQATLKGSLPITVTWLKDNDEITEDDNIRMTFENNVASLYLSGIEVKHDGKYVCQAKNDAGIQRCSALLSVKEPATIMEEAVSIDVTQGDPATLQVKFSGTKEISAKWFKDGQELTLGPKYKISVTDTVSILKIISTEKKDSGEYTFEVQNDVGRSSCKASINVLDLIIPPSFTKKLRKMDSIKGSFIDLECIVAGSHPISIQWFKDDQEISASDKHKFSFHDNTAFLEISQLEGTDSGTYTCSATNKAGHSQCSGHLTVKEPPYFVEKPQSQDVNPGTRVQLKALVGGTAPMTIKWFKDNKELHPGAARSVWKDDTSTILELFSAKAADSGTYICQLSNDVGTTSSKATIFVKEPPQFIKKPSPVLVLRNGQSTTFECQVTGTPEIRVSWYLDGNEITDLRKYGISFVDGLATFQISNARVENSGTYVCEARNDAGTASCSIELKVKEPPIFIRELEPVEVVKDSDVELECEVMGTTPFEVTWLKNNKEIRSGKKYTMSEKMSVFYLHITKCDPSDVGEYQCIIANEGGSCACSARVALKEPPSFIKKIENVTTVLKSSATFQSTVAGSPPISITWLKDDQILEENDNVHISFEDSVATLQVRSVDNGHSGRYTCQAKNESGIERCYAFLLVQEPAQIIEKAKSVDVTEKDPVTLECVVAGTPELKVKWLKDGKQIVPSRYFSMSFENNVASFRIQSVMKQDSGQYTFKVENDFGSSSCDAYLRVLDQDIPPSFTKKLTKMDKVLGSSIHMECKVSGSLPISAQWFKDGKEISTSAKYRLVCHENTVSLEVSNLELEDTANYTCKVSNVAGDNACSGILTVKEPPSFLVKPERQQAIPDSTVEFKAVLKGTPPFKIKWLKDDVELVSGPKCFIGLEGSTSFLNLYSVDSSKTGQYTCQVTNDVGSDSCTTMLLVTEPPKFVKKLEASKIIKAGDSARLECKITGSPEIQVVWYRNEHELTASDKYQMTFIDSVAVIQMNSLGTEDSGDFICEAQNPAGSTSCSTKVIVKEPPVFSSFPPIVETLKNTEVSLECELSGTPPFEVVWYKDKRQLRSSKKYKVASKNFHASIHILNVESTDIGEYHCKAQNEVGSDACVCAVKLKEPPKFISKLNSLTVVAGEPAELQASIEGAQPISVQWLKEKEEVIRESENIRISFVNNVATLQFAKVEPANAGKYICQVKNDGGVRENMATLTVLEPAVIIEKAGSMTVTVGETCALECKVAGTPELSVEWYKDGKLLTSSQKHKFSFYNKISSLKILSVEKEDAGTYTFQVQNNVGKSSCTAVVDVSDRMVPPSFTRRLKDTGGVLGTSCILECKVAGSSPISIAWFHEKTKIVSGAKYQTTFSDNVCTLQLNSLDSSDMGSYTCVAANVAGSDECRALLTVQEPPSFVKEPEPLEVLPGKNITFTSVIRGTPPFKVGWFRGARELVKGNRCNIYFEDTVAELELFNIDISQSGEYTCVVSNNAGQASCTTRLFVKEPATFVKKLSDHSVEPGKSIILEGTYTGTLPISVTWKKDGVSITPSERCNIVTTEKTCILEILSSTKGDAGHYSCEIENEAGRDACDALVSTLEPPYFVTELEPLEASVGDSVSLQCQVAGTPEITVSWFKGDTKLRSTPEYRTYFTNNVATLVFNKVSINDSGEYTCMAENSIGTAASKTIFRIQERQLPPSFARQLKDIEQTVGLPVTLTCRLNGSAPIQVCWYRDGVLLRDDENLQMSFVDNVATLKILQTDLSHSGQYSCSASNPLGTASSTARLTAREPKKSPFFDIKPVSIDVIAGESADFECHVTGAQPMRVTWSKDNKEIRPGGNYTITCVGNTPHLRILKVGKGDSGQYTCQATNDVGKDMCSAQLSVKEPPKFIKKLDASKVAKQGESIQLECKISGSPEIKVVWFRNDSELHESWKYNMSFVNSVALLTINEASAEDTGDYICEAHNGVGDASCSTALKVKAPPVFTQKPPPVGALKGSDVILQCEISGTPPFEVVWVKDRKQVRSSKKFKITSKNFDTSLHIFNLEAPDIGEYHCKATNEVGSDTCACTVKFKEPPRFVKKLSDASTLIGDPVELQAVVEGFQPISVVWLKDKGEVIRESENVRISFVDNIATLQLGSPEASQSGKYVCQIKNDAGMRECSAVLTVLEPATIVEKPEPMTVTTGNPFTLECVVAGTPELSAKWFKDGRELSSGSRHHITFVRNLASLKIPSAEMNDKGLYTFEVENRVGKSSCTVSVHVSDRVVPPSFVRRLKDTSATLGASVVLECRVSGSAPISVGWFLDGNEIISSPKCQSSFADNVCTLTLSSLEPSDTGAYTCVAANVAGQDESSAVLTVQEPPSFEQTPDSVEVLPGMSLTFTSVIRGTPPFKVKWFKGSRELVSGEACTISLEDFVTELELLEVEPGQSGDYSCLVTNDAGSASCTTHLFVKEPATFVKRLADTSVETGSPIVLEATYSGTPPISVSWMKNEYPLSQSPNCGITTTEKSSILEILESTIEDYAQYACLIENEAGQDICEALVSVLEPPYFIEPLEHVEAAIGEPITLQCKVDGTPEIRISWYKEHTKLRSAPAYKMQFKNNVASLVINKVDHSDVGEYTCKAENSVGAVASSAVLVIKERKLPPSFARKLKDVHETLGFPVAFECRINGSEPLQVSWYKDGELLKDDANLQMSFVHHVATLQILQTDQSHVGQYNCSASNPLGTASSSAKLILSDNREIRPGGNYKMTLVENTATLTVLKVAKGDAGQYTCYASNVAGKDSCSAQLGVQGFIKKLDQSRIVKQDEYTRYECKIGGSPEIKVLWYKDEVEIQESSKFRMSFEDSVAILEMHSLSVEDSGDYTCEARNAAGSASSSTSLKVKEPPVFRKKPFPVETLKGADVHLECELQGTPPFQVSWHKDKRELRSGKKYKIMSENLLTSIHILNVDTADIGEYQCKATNDVGSDTCVGSVTMKAPPQFVKKLTDISTIIGKEVQLQTTIEGAEPISVAWFKDKGEIVRESDNIWISYSENIATLQFSRAEPANAGKYTCQIKNDAGMQECYATLSVLEPAAIVEKPESIKVTTGDTCTLECTVSGTPELSTKWFKDGKELTSDNKYKISFFNKVSGLKIINVVPGDSGVYSFEVQNPVGKDSCKVSIQVSDRIIPPSFTRKLKETNGLSGSSVVMECKVYGSPPISVLWFHDGNEISSGRKYQTTLTDNTCALTVNMLEEADAGDYTCIATNVAGSDECSAPLTVREPPSFVQKPDPMDVLTGSNVTFTSIVKGSPPFTVSWFKGSTELVPGARCNVSLQDSVGELELFDVDTSQSGEYTCIVSNEAGRASCTTRLFVKAPAIFVKRLNDYSIEKGKPLILEGTFSGTPPISVTWKKNGINVIASQRCNITTTEKSAILEILSSTVEDSGQYNCYIENASGKDSCSAQILILEPPYFVKQLEPVKVTVGDSASLQCQLAGTPEIGVSWYKGDTKLRPTATCKMHFKNNVATLVFTQVDSSDSGEYICRAENSVGEVSSSTFLTVQEQKLPPSFSRQLRDVQETVGLPVVFECAVSGSEPISVSWYKDGKPLKDSPNIQTSFLDNIATLNIFKTDRSLSGQYSCTATNPIGSASSGAKLILTEGKNPPFFDIPLAPMDAVVGESADLECHVTGTQPIKVTWAKDNREIRSGGNYQISYLENSAHLTIVKVDKGDSGQYTCYAVNEVGKDSCTAQLNIKERLIPPSFTKKLSETVEETEGNSFKLEGRVAGSQPITVAWYKNNVEIHPTSNCEIMFKNNALLLQVKRASMADAGLYTCKATNDAGSALCTSSIVIKEPKKPPVFDQHLAPVTASEGDSVQLSCHVQGSEPIRIQWLKAGREVKPSDRCSFSFASGTAMLELKETAKADSGDYVCKASNVAGSDTSKCKVTIKEKPAAAPAAKKAAVDGKLFFVSEPQSIRVVEKTTATFIAKVGGDPIPNVKWTKGKWRQLNQGGRILIHQKGDEAKLEIRDTTKTDSGLYRCVAFNKHGEIESNVNLQVDERKKQEKIEGDLRAMLKKTPALKKGSGEEEEIDIMELLKNVDPKEYEKYARMYGITDFRGLLQAFELLKQSQEEETHRLEIEELEKSERDEKEFEELVAFIQQRLTQTEPVTLIKDIENQTVLKDNDAIFEIDIKINYPEIKLSWYKGTEKLEPSNKYEISIDGDRHTLRVKNCQPKDQGNYRLVCGPHIASAKLTVIEPAWERHLQDVTLKEGQTCTMTCQFSVPNVKSEWFRNGRVLKPQGRVKTEVEHKVHKLTIADVRAEDQGQYTCKHEDLETSAELRIEAEPIQFTKRIQNIVVSEHQSATFECEVSFDDAIVTWYKGPTELTESQKYNFRNDGRCHYMTIHNVTPDDEGVYSVIARLEPRGEARSTAELYLTTKEIKLEMKPPDIPDSRVPIPTMPIRAVPPEEIPPAVAPSIPLLLPLPEEKKPPAKRIEVTKKGVKKDTKKVVTKPKEEAPPPPVPEVAKKPPPPTPMIPAKASEIIDVSSKAEEVKITTITRKKEVHKEKEAVYEREEAVYEKKVHIEPWEEPYEELETEPYTEPYEEPYYEEPDEDYEEIKVEAKKQVHEEWEEDFEEGQEYYEREEGYDEGEEEWEEIYHEREIIQVQKEVHEELHEKKIPAKVPEKKVPPPKVVKKPVVEKVEKTTRRMEEEKVQVIKVPEVSKKIVPQKPSRTPVQEEIIEVKVPAVHTKKMVISEEKMFFASHTEEEVSVSVPEVQKKTVTEEKIHVAVSKKIEPPPKVPEPPKKPVPEEVVPVPIPKKVEPPAAKVPEAPKKPVPEEKKPVPIPKKKEPAAPPQVPEAPKKPAPEEKIPVPVTKKKEAPPAKVPEVQKKVVTEEKIAIITQREESPPPAEIPKKKVPEEKRPVPRKEEVPPPKAEVSKKTVVEEKRFAAEEKLSVAVPQRVELMRHEEEEWTYSEEEERVSVSVYREEERDEEEAEITEYEVLEEPEEYVVEEKMHFISKKVEVEPAKVPEPPKKIVPEKKVPAPAPKKVPPAKAPEESKRPVPEKRAPAEEVGIEEPPPTKVAERHMKITQEEKVLVAVTKKEAPPRARVPEEPKKVAPEERFPKLKPRREEEPPAKEVTVTEEKKWSYTREEETVSEHREEEYEDYEDYEEYKEFEEYEPTEEYDQYDEYAEREVEHYEEHEEYVTEPKKPVPVKPAQEPVPAKPKAPPPKVLKKAVPEEKAPLPIQKKLKPLPPKAPEEPKKVVEEKIQISITKREKQQVTEPVAKVPMKPKRVVPEAKIPAPTKEVAVPVREEVEAHEEYIVEEEEEYVHEEEYVHKEEYVHEEEYVHKEEYIHEEEEHLHEEEETIAEEEVVPVAPVKVPVVPKKPVPEEKKPVPVPKKKEAPPAKVPEIPKKPEEKVPVPIPKKEKAPPAKVPEVPKKPVPEEKPPVPVPKKVEPPPAKVPEVPKKPVPEKKVPAPTPKKVEAPPAKAPKKREVVPVPVALPREEEEEEVPFEEVPEEEILPEEEVPSEEEAPPEEVPPEEEEVLPEEEEVLPEEEEVLPEEEEVQPEEEALPEIKPKVPKPAPVPKKTVPEKKVPVPVPKKVEPPPPPKVKMPYLLFVNVSSVIAVHGVLVFVRLKFQNIFKVPVVPKKPEPEKKVPVPALKKAVVPPAKVPEVSKKVEERRIIPPKEEEVPPAEAPEVVKKAVPEAPTPVPKKAEAPPAKVPKKIPEEKVPVPVQKKEAPPAKVPEVPKKVPEKKKIPEKKVPVPKKEAVPPAKGKAVFEEKISVAYQQEELVQERIELELVEAKVEEAFEEEEFHEVQEYFEEEEFHEVEEFIRVEERRFQEEHKVEEVHRVIEFLEAEEVEVYEKPKIPPKKVPEVTKKTVVEEKIRAPEEPKVPAPKGTCLCCFSSSSKSPCITFHKGEKEHSFLRTRRQLQMAEIAIYILSYNLAIFALVENIIKSTAPEVPKKITPEEKVREAVPKKPEVPPPKVPEVPKKIIQEEKLPVVLPEDTEIYKSETTREAFPELKSYKAVPEIPEPPSPEVPEAPREVVAKKKVLPPQVPEVVPVKVPEEPKEVIPEKKVSLVPPKKPAAPPVTVPEAPKEAAPEKKVPVAPKKKPEAPPVKVPEAPKKVVPEKKLPVAAPKKPEAPAAEVPEVPKTAVPQKKIPEAIPPKPESPPLEVPEVPPKEVTPEKKVPAAPPTKPEIPPPKVPQVQETVPEKTRPVGPPKKPEATTVPVPEVQETVPEKTRPVGPPKKPEATTVPVPEADQAVVPEKKVPRVPPKKVEAPPITVPEEPKEVIPEKKVSLVPPKKPAAPPVTVPEAPEEVFSEDEETLAPPQEPEAPPAKVPEAPKEVVPEKKVSVVPPKKPEAPPAKVPEAPKEAAPEKKVPVAPKKKPEAPPVKVPEAPKKVVPEKKLPVAAPKKPEAPAAEVPEVPKAAVPQKKIPEAIPPKPESPPPEVYEEPEEEIVPEEPPEEAVEEPVPAPPPKVTEPPKKPVPEKKAPPAVVKKPEPPPAKVPEVPKEAPPEKKVPPKKPEAPPAKVPEVPKEVVTEKKVAVPKKPEVPPAKVYEEPEEVTAEEEEPAPAVEEEEYEAPPPPAPVPEEPKKVVPEKKFPVIKKPEAPPPKVLSRLAELMCLSYAFILNTTNIFKVPEVPKKAVPVKKVPVVKKPEPPEAEVPEVPKKLVPVKKEPVPVTKKTEVLPEKVPEAPKKITPEKKESVPVPEEPEAPPASVEETPEETIYEEKATITIGRKETPPVEEREIEKFIQPEEPELEPEPEEIPVQEPEPEKKVIEKPKLKPRPPARPPSPPKEDVKEKMFQLKAVSKKKVPEKPEVVEKVEPAPLKVPTAEKKVRKLLPEPKPQPKEEVVLKSVLRKKPEEEEPKVEPKKVEKAKKPEEPQPPPKAVEVEAPPEPTPKERKVPEPAKVPEIKPAIPLPGPEPKPKPEPEVKTMKAPPIEPAPTPIAAPVTAPVVGKKAEAKPKDEAAKPKGPIKGVAKKTPSPIEAERKKLRPGSGGEKPPDEAPFTYQLKAVPLKFVKEIKDIVLTEAESVGSSAIFECLVSPSTAITTWMKDGSNIRESPKHRFIADGKDRKLHIIDVQLSDAGEYTCVLRLGNKEKTSTAKLIVEELPVRFVKTLEEEVTVVKGQPLYLSCELNKERDVVWRKDGKIVVEKPGRIVPGVIGLMRALTINDADDTDAGTYTVTVENANNLECSSCVKVVEIIREWLVKPIRDQHVKPKGTAVFTCDIAKDTPNIKWFKGYDEIPLEPNDKTEILKEGNHLFLKVKNAMPEDIDEYAVEIEGKRYPAKLTLGEREVELLKPIEDVTIYEKESASFDAEISEEDIPGEWKLKGELLRPSPTCEIKAEGGKRFLTLHKVKLDQAGEVLYQACNAITTAILTVKEIELDFAVPLKDVTVPEKRQARFECVLTREANVIWSKGPDIIKASDKFDIIADGKKHILVINDSQFDDEGVYTAEVEGKKTSAQLFVTGIRLKFISPLEDQTVKEGQTATFVCELSHEKMHVVWFKNDVKLHTTRTVLMSSEGKTYKLEIRETTLDDISQIKAQVKNLSSTANLKVLEADPYFTVKLHDKTGVEKDEIILKCEVSKDVPVKWFKDGEEIVPSPKHSVKTDGLRRILKIKKAELKDKGEYVCDCGTDTTKANVTVEARLIKVEKPLYGVEVFVGETARFEIELSEPDVHGQWKLKGEPLTASPDCEIIEDGKKHVLVLYNCQLDMTGEISFQAANAKSAANLKVKELPLIFITPLSDVKVFEKDEAKFECEVSREPKTFRWLKGTQEITGDDRFELIKDGTRHSLVIKSAAFEDEAKYMFEAEDKRTSGKLIIEGIRLKFLTPLKDVTAKERENAVFTVELSHDNIPVSWFKNDQRLHTSKRVSMHDEGKTHSITFKDLSIDDTSQIRVEAMGISSEAKLTVLEGDPYFTGKLQDYTGVEKDEVILQCEISKADAPVKWFKDGKEIKPSKNVVIKADGKKRMLILKKALKSDIGQYTCDCGTDQTSGKLDIEDREIKLVRPLYSVEVMETETARFETEISEDDIHANWKLKGEALLQTPECEIKEEGKIHVLILHNCRLDQTGGVDFQAANVKSSAHLRVKPRVIGLLRPLKDVTVTAGETATFDCELSYEDIPVEWYLKGKKLEPNDKVVTRSEGRVHTLTLRDVKLEDAGEVQLTAKDFKTQANLFVKEPPVEFTKPLEDQTVEEEATAVLECEVSRENAKVKWFKNGTEILKSKKYEIVADGRVRKLIIHGCTPEDIKTYTCDAKDFKTSCNLNVVPPHVEFLRPLTDLQVKEKETARFECEISKENEKVQWFKDGAEIKKGKKYDIISKGAVRILVINKCLLNDEAEYSCEVRTARTSGMLTVLEEEAVFTKNLANLEVSEGDTIKLVCEVSKPGAEVIWYKGDEEIIETGRFEILTDGRKRILIIQNAQLEDAGSYNCRLPSSRTDSKVKVHELAAEFISKPQNLEILEGEKAEFVCTISKESFEVQWKRDDQTLESGDKYDIIADGKKRVLVVKDATLQDMGTYVVMVGAARAAAHLTVIEKLRIIVPLKDTKVKEQQEVVFNCEVNTEGAKAKWFRNEEAIFDSSKYIILQKDLVYTLRIRDARLDDQANFNVSLTNHRGENVKSAANLIVEEEDLRIVEPLKDIETMEKKSVTFWCKVNRLNVTLKWTKNGEEVAFDNRISYRIDKYKHSLIIKDCGFPDEGEYVVTAGQDKSVAELLIIEAPTEFVEHLEDQTVTEFDDAVFSCQLSREKANVKWYRNGREIKEGKKYKFEKDGSIHRLIIKDCRLEDECEYACGVEDRKSRARLFVEEIPVEIIRPPQDILEAPGADVIFLAELNKDKVEVQWLRNNMIVVQGDKHQMMSEGKIHRLQICDIKPRDQGEYRFIAKDKEARAKLELAAAPKIKTADQDLVVDAGQPLTMVVPYDAYPKAEAEWFKENEPLSTKTVDTTAEQTSFRISEAKKDDKGRYKIVLQNKHGKAEGFINLQVIDVPGPVRNLEVTETFDGEVSLAWEEPLTDGGSKIIGYVVERRDIKRKTWVLVTDRADSCEFTVTGLQKGGVEYLFRVSARNRVGTGEPVETDSPVEARSKYDVPGPPLNVTITDVNRFGVSLTWEPPEYDGGAEITNYVIELRDKTSIRWDTAMTVRAEDLSATVTDVVEGQEYSFRVRAQNRIGVGKPSAATPFVKVADPIERPSPPVNLNASEQTQSSVQLTWEPPLKDGGSPILGYIIERREEGKDNWIRCNMKPVPELTYKVTGLQKGNKYLYRVSAENAAGVSDPSEILGPLTADDAFVEPTMDLSAFKDGLEVIVPNPIKILVPSTGYPRPKATWTFGDQVLEEGDRVKMKTISAYAELVISPSERTDKGIYTLTLENPVKSISGEINVNVIAPPSAPKELKFSDITKDSVHLTWEPPDDDGGSPLTGYVVEKRDMSRKTWTKVMDFVTDLEFTVPDLVQGKEYLFKVCARNKCGPGEPAYTDEPVNMSAPATVPDPPENVKWRDRTANSIFLTWDPPKNDGGSRIKGYIVEKCPRGSDKWVACGEPVPDTKMEVTGLEEGKWYAYRVKALNRQGASKPSKPTEEIQAVDTQEAPEIFLDVKLLAGITVKAGTKIELPATVTGKPEPKITWTKADTLLKPDQRITIENVPKKSTVTITDSKRSDTGTYIIEAVNVCGRATAVVEVNVLDKPGPPAAFDITDVTNESCLLTWNPPRDDGGSKITNYVVERKATDSDVWHKLSSTVKDTNFKATKLTPNKEYIFRVAAENMYGVGEPVQAAPIIAKYQFDPPGPPTRLEPSDITKDAVTLTWCEPDDDGGSPITGYWVERLDPDTDKWVRCNKMPVKDTTYRVKGLTNKKKYRFRVLAENLAGPGKPSRSTEPILIKDPIDPPWPPGKPTVKDIGKTSLVLNWTKPEHDGGAKIESYVIEMLKTGTDEWVRVAEGVPTTEHLLTGLMEGQEYSFRVRAVNKAGESEPSEPSDPVLCREKLYPPSPPRWLEVINITKNTADLKWTVPEKDGGSPITNYIVEKRDVRRKGWQTVDTTVKDTKCTVTPLTEGSLYVFRVAAENAIGQSDYTEIGDSVLAKDTFTTPGPPYALTVVDVTKRHVDLKWEPPKNDGGRPIQRYIIEKKEKLGTRWVKAGKTSGPDCNFRVTDVIEGTEVQFQVRAENEAGVGHPSEPTEILSIEDPTSPPSPPLDLHVTDAGRKHIAIAWKPPEKNGGSPIIGYHVEMCPVGTEKWMRVNSRPIKDLKFKVEEGIVPDKEYVLRVRAVNAVGVSEPSEISENVVAKDPDCKPTIDLETHDIVVIEGEKLNIPVPFRAVPVPTVSWHKDGKEVKASDRLTMKNDHISAHLEVPKSVHADAGVYTITLENKLGSATASINVKVIGLPGPCKDIKASDITKSSCKLTWEPPEFDGGSPILHYVLERREAGRRTYIPVMSGENKLSWTVKDLIPNGEYFFRVKAVNKIGGGEYIELKNPVIAQDPKQPPDPPVDVEVHNPTAKAMTITWKPPLYDGGSKIMGYIIEKITKGEDRWKRCNEHLVPVLTYTAKGLEEGKEYQFRVRAENAAGIGEPSRATPPTKAVDPIDAPKVILRTSLEVKRGDEIALDATISGSPYPTITWIKDENVIVPEEIKKRAAPPVRRKKGEAEEEEPFSLPLTERLSINNSKQGESQLRIRDSLRPDHGQYMIKVENDHGVAKAPCSVSVLDTPGPPINFVFEDIRKDSVLCKWEPPLDDGGSEIINYTLEKKDKTKPDSDWIVITSTLRNCKYSVTKLIEGKEYLFRVRAENRFGPGPPCVSKPLLAKDPFEPPDAPDKPIVEDVTSNSMLVKWNEPKDNGSPILGYWLEKREVNSTHWSRVNKTLLSSLKTKVDGLLEGLTYVFRVCAENAAGPGKFSPPSDPKTARDPISPPGPPVPRVADTSSTTIELEWEPPAFNGGGEIMGYFVDKQLVGTNEWSRCTEKMIKVRQFTVKEIREGADYKLRVSAVNAAGEGPPGETEPVTVAEPQDSCSPSTEPPTVELDVSVKGGIQIMAGKTLRIPAEVTGRPVPTKVWTIEEGELDKERVIIENVGTKSELIIKNALRKDHGRYVITATNSCGSKFAAVRVEVFDVPGPVLDLKPVVTNRKMCLLNWSDPADDGGSDITGFIIERKDAKMHTWRQPIETERSKCDITGLIEGQEYKFRVIAKNKFGCGPPVEIGPILAVDPLGPPTSPERLTYTERTKSTITLDWKEPRSDGGSPIQGYIIEKRRHDKPDFERVNKRLCPTTSFLVENLDEHQMYEFRVKAVNDVGESEPSLPLNVVIQDDEVPPTIKLRLAVRGDTIKVKAGEPVNIPADVTGLPMPKIEWSKNEKVIDKPTDTLNITKEEVSRSEAKTELSIPKAAREDKGTYTITASNRLGSVFRNVHVEVYDRPSPPRNLAVTDIKAESCYLTWDAPLDNGGSEITHYIIDKRDASRKKSEWEEVTNTAVERRYGIWKLIPNGQYEFRVRAVNKYGISDECKSDKVVIQDPYRLPGPPGKPKVLERTKGSMLVSWTPPLDNGGSPITGYWLEKREEGGTYWSRVSRAPITKVGLKGVEFNVPRLIEGVKYQFRAMAINAAGIGPPSEPSDPAVAGDPIYPPGPPSCPEVKDKTKSSISLAWKPPAKDGGSPIKGYIVEMQEEGTTDWKPVNEPDKLLTACECVVPNLKELRKYRFRVKAVNEAGESEPSDTTGEIPATDIQEVPEVFIDIGAQDCLVCKAGSQVKIPAVIKGRPTPKSSWEFDGKAKKAMKDGVHDIPEDAQLETAENSSVIIIPECTRAHSGKYSITAKNKAGQKTANCRVKVMDAPGPPKDLKVSDITRGSCRLSWKMPDDDGGDRIKGYVIEKKTIDGKAWTKVNPNCGSTTFVVPDLISEQQYFFRVRAENRFGIGPPAETIQRTTARDPIYPPDPPIKLKIGLITKNTVHLSWKPPKNDGGSPVTHYIVECLAWDPTGKKKEAWRQCNRRDVEELEFTVEDLIEGGEYEFRVKAVNEAGVSKPSATVGPVIVKDQTCPPAIELKEFMEVEEGTDVNIVAKIKGVPFPTLTWFKAPPKKPDSKEPVVYDTHVNKQVVDDTCTLVIPQSRRSDTGLYSITAVNNLGTASKEMRLNVLGRPGPPVGPIKFESISADQMTLSWLPPKDDGGSKITNYVIEKREANRKTWVRVSSEPKECMYTIPKLLEGHEYVFRIMAQNKYGIGEPLDSEPETARNLFSVPGAPDKPTVSSVTRNSMTVNWEEPEYDGGSPVTGYWLEMKDTTSKRWKRVNRDPIKAMTLGVSYKVTGLIEGSDYQFRVYAINAAGVGPASLPSDPVTARDPVAPPGPPFPKVTDWTKSSVDLEWSPPLKDGGSKITGYIVEYKEEGKEEWEKGKDKEVRGTKLVVTGLKEGAFYKFRVRAVNVAGVGEPGEVTDVIEMKDRIVSPDLQLDASVRDRIVVHAGGVIRIIAYVSGKPPPTVTWSMNERALPQEAAIETTAISSSMVIKNCQRSHQGVYSLLAKNEGGERKKTIIVDVLDVPGPVGIPFLSDNLTNDSCKLTWFSPEDDGGSPITNYVIQKREADRRAWTPVTYTVTRQNATVQGLIQGKSYFFRIAAENSIGMGPFVETPNALVIRDPITVPERPEDLEVKEVTKNTVSLTWNPPKYDGGSEIINYVLESRLIGTEKFHKVTNDNLLSRKYTVKGLKEGDTYEYRVSAVNIVGQGKPSFCTKPITCKDELAPPTLDLDFRDKLTVRVGESFALTGRYSGKPKPKIDWFKDEADVLEDDRTHIKTTPTTLALEKTKAKRSDSGKYCVVVENSTGSRKGFCQVNVVDRPGPPVGPVIFDEVTKEYMVISWKPPLDDGGSEITNYIIEKKELGKDIWMPVTSASAKTTCKVPKLLEGKDYIFRIHAENLYGISDPLVSDSMKAKDRFRVPDAPEQPVVTEVTKDSALVTWNKPNDGGKPITNYILEKRETMSKRWVRVTKEPIHPYTKYRVPDLLEGCQYEFRVSAENEIGIGDPSPPSKPVFARDPIAKPSPPINPEAIDTTCNSVELTWQPPRHDGGSKILGYIVEYQKVGDEEWRRANHTPESCPETKYKVTGLRDGQSYKFRVLAVNEAGESDPAHVPEPVLVKDRLEPPELILDANMAREQHIRVGDTLRLSAIIKGVPFPKVTWKKEDREAPTKAQIDVTPVGSKLEIRNAAHEDGGIYSLTVENPAGTKTVSVKVLVLDKPGPPRDLEVSEIRKDSCYLTWKEPLDDGGSVVTNYVVERKDVATAQWSPLSTTSKKKSHMAKHLTEGNQYLFRVAAENQYGRGPFVETPKPIKALDPLHPPGPPKDLHHVDVDKTEVSLVWNKPDRDGGSPITGYLVEYQEEGDKDWIKFKTVKNLDCVVTGLQQGKTYRFRVKAENIIGLGLPDTTIPIECQEKLVPPSVELDVKLIEGLVVKAGTTVRFPAIIRGVPVPTAKWTTDGTEIKTDDHYTVETDSFSSVLTIKNCLRKDTGEYQLTVSNAAGTKTVAVHLTVLDVPGPPTGPINILDVTPEYMTISWQPPKDDGGSPVINYIVEKQDTRKGTWGVVSAGSSKLKLKVPHLQKGCEYVFRVKAENKMGVGPPLDSIPTVAKHKFSPPSPPGKPVVTDITENAATVSWTLPKSDGGSPITGYYVERREITGKWVRVNKTPIADLKFRVTGLYEGNTYEFRVFAENLAGLSNPSPSSDPIKACRPIKPPGPPINPKLKDKSKESADLVWTKPLSDGGSPILGYVVEYQKPGTAQWDRINKDELIRQCAFRVPGLIEGNEYRFRIRAANIVGEGEPRELAESVIAKDILHPPEVELDVTCRDVITVRVGQTIRILARVKGRPEPDITWSKEGKVLVKDKRVDLIHDLPRVELQIKEAVRADHGKYIISAKNSSGHAQGSAIVNVLDRPGPCQNLKVSNVTKENCTISWENPLDNGGSEITNFIVEYRKPNQKGWSIVASDVTKRLVKANLLANNEYYFRVCAENKVGVGPTIETKTPILAINPIDRPGEPENLHIADKGKTFVYLKWRRPDYDGGSPNLSYHVERRLKGSADWERVHKGSIKETHYMVDKCVENQIYEFRVQTKNEGGESDWVRTEEVVVKEDLQKPVLDLKLSGVLTVKAGDTIRLEAGVRGKPFPEVAWTKDKDATDLTRSPRVKIDTSAESSKFSLTKAKRSDGGKYVITATNPAGSFVAYATVNVLDKPGPVRNLKITDVSSDRCTIRWDPPEDDGGCEIQNYILEKCESKRMVWSTYSANVLTPSATVTRLIEGNEYIFRVRAENKIGTGPPTESKPVIAKTKYDRPGRPDPPEVTKVSKEEMTVVWNAPEYDGGKSITGYYLEKKEKHAVRWVPVNKSAIPERRLKVQNLLPGHEYQFRVKAENEVGIGEPSLPSRPVVAKDPIEPPGPPTNFKVVDTTKSSITLAWGKPVYDGGAPIIGYVVEMRPKIADASPDEGWKRCNAAAQLIRMEFTVTSLDENQEYEFRVCAQNQVGIGRPAELKEAIKPKEILEPPEIDLDASMRKLVVVRAGCPIRLFAIVRGRPAPKVTWRKVGIDNVVRKGQVDLVDTMAFLVIPNSTRDDSGKYSLTLVNPAGEKAVFVNVKVLDTPGPVADLKVSDVTKTSCHVSWAPPENDGGSQVTHYIVEKREAERKTWSTVTPEVKKTSFNVTNLVPGNEYFFRVTAVNEYGPGVPTDIPKPVLASDPLSEPDPPRKLEVTEMTKNSATLAWLPPLRDGGAKIDGYIISYREEDQPADRWTEYSVVKDLSLIVTGLKEGKKYKFRVAARNAVGVSMPREAEGVYEAKEQLLPPKILMPEQITIKAGKKLRVEAHVYGKPNPICKWKKGDDEVVTSSHLAIHKADGSSVLIIKDVTRKDSGYYSLTAENSSGSDTQKIKVTVMDAPGPPQPPFDISEIDADACSLSWHIPLEDGGSNITNYIVEKCDVSRGDWVTALASVTKTSCRVGKLIPGQEYIFRVRAENRFGISEPLTSPKMLAKFPFDVPSEPKNARVTKVNKDCIFVAWDRPDSDGGSPITGYLIERKERNSLLWVKANDTIVRSTEYPCAGLVEGLEYSFRIYALNKAGSSPPSKPTEYVTARMPVDPPGKPEVVDVTKNSASLIWARPKHDGGSRIIGYFVEACKLPGDKWVRCNTTPHQIPQEEYTATGLEENAQYQFRAIAKTAVNISQPSEPSDPVTILAENVPLRIELSVEMKSLLTVKAGTNVCLDATVFGKPMPTVSWKKDTTPIKQAEGIKMAMKRNLCTLELFSVNRKDSGDYTITAENSSGSKSATIKLKVLDKPGPPASVKINKMYADRAMLSWEPPLEDGGSEITNYIIDKRETSRPNWAQVSATVPITSCTVEKLIEGHEYQFRICAENKYGVGDPILTEPAIAKNPYDPPGRCDPPVISNITKDHMTVSWKAPADDGGSPITGYLVEKRETQAVNWTKVNRKPVIERTLKATGLQEGTEYEFRVTAINKAGPGKPSDASKAVYAQDPLYPPGPPAFPKVYDTTRSSVSLSWGKPAYDGGSPIIGYLVEVKRADSDHWVRCNLPEKLQKTRFEVTGLMENTEYQFRVYAVNKIGYSDPSDVPDKHCPKDILIPPEGELDAELRKTLILRAGVTMRLYVPVKGRPPPKITWSKPNVNLRERIGLDIKSTDFDTFLRCENVNKYDAGKYILTLENSCGKKEYTIVVKVLDTPGPPVNVTVKEVSKDSAYVTWDPPIIDGGSPIINYVVEKRDAERKSWSTVTTECSKTSFRVSNLEEGKSYFFRVFAENEYGIGDPGETRDAVKASETPGPVVDLKALAITKSSCTIGWKKPRSDGGSRITGYVVDFLTEENKWQRVMKSLSLQYSTKDLKEGKEYTFRVSAENENGEGTPSEIVVVAKDDVVAPDLDLKDLPDLCYLAKENSNFRLKIPIKGKPAPSVSWKKGEDPLATDTRVSVESTAVNTTLVVYDCQKSDAGKYTITLKNVAGTKEGTLSIKVVGKPGIPTGPIKFDEVTAEAMTLKWGPPKDDGGSEITNYVLEKRDSVNNKWVTCASAVQKTTFRVTRLHEGIEYTFRVSAENKYGVGEGLKSEPIVAKHPFDVPDAPPPPNIVDVRHDSVSLTWTDPKKTGGSPITGYHIEFKERNSLLWKRANKTPIRMKDFKVTGLTEGLEYEFRVMAINLAGVGKPSLPSEPVVALDPIDPPGKPEVISVTRNSVTLIWTEPKYDGGHKLTGYIVEKRDLPSKSWMKANHVNVPDCAFTVTDLVEGGKYEFRIRAKNTAGAISAPSESTGTIICKDEYEAPTIVLDPTIKDGLTVKAGDSIVLSAISILGKPLPKSSWSRAGKDIRPSDIAQITSTPTSSMLTVKYATRKDAGEYTITATNPFGTKEEHVKVSVLDVPGPPGPIEISNVSAEKATLTWTPPLEDGGSPIKAYVLEKRETSRLLWTVVSEDIQACRHVVTKLIQGNEYLFRVSAVNHYGKGEPVQSEPVKMVDRFGPPGPPGKPEISNVTKNTATVSWKRPTDDGGSEITGYHVERREKKGLRWVRATKTPVSDLRCKVTGLQEGNTYEFRVSAENRAGIGPPSDASNPVLMKDVAYPPGPPSNAHVTDTTKKSASLAWGKPHYDGGLEITGYVVEHQKVGDDAWIKDTTGTALRITQFVVPDLQTKEKYNFRISAINDAGVGEPAVIPNVEIVEKEVAPDFELDAELRRTLVVRAGLSIRIFVPIKGRPAPEVTWTKDNINLKHRANIENTESFTLLIIPECNRYDTGKFVMTIENPAGKKSGFVNVRVLDTPGPVLNLRPTDITKDSVTLHWDLPLIDGGSRITNYIVEKREATRKSYSTVTTKCHKCTYKVTGLTEGCEYFFRVMAENEYGVGEPTETTEPVRASEAPLPPDSLNIMDITKNTVSLAWPKPRHDGGSKITGYVIEAQRKGSDQWTHISTVKGLECVVRNLTEGEEYTFQVMAVNSAGRSAPRESRPVIVKEQTMLPELDLRGIYQKLVIARAGDNIKVEIPVLGRPKPTVTWKKGDQILKQTQRVNVENTATSTILNINECVRSDSGPYPLTAKNTVGEVGDVITIQVHDIPGPPTGPIKFDEVSSDFVTFSWEPPENDGGVPISNYVVEMRQTDSTTWVELATTVIRTTYKATRLTTGVEYQFRVRAQNRYGVGPGITSASVVANYPFKVPGPPGTPQVTAVTKDSMTISWHEPLSDGGSPILGYHIERKERNGILWQTVSKALVPGNIFKSTGLTDGIAYEFRVIAENMAGKSKPSKPSEPMFALDPIDPPGKPVPLNITRHTVALKWAKPEYTGGFKITSYVVEKRDLPNGRWLKANFSNILENEFTVSGLTEDAAYEFRVIAKNAAGAISPPSEPSDAITCRDDLEAPRIMVDVRFKDTITLKAGEAFKLEADVSGRPPPTMEWTKDGKELEGTGKLEIKIADFSTHLINKDSSRTDSGAYILTATNPGGFAKHIFNVKVLDRPGPPEGPLAVSDVTSEKCVLSWLPPLDDGGAKIDHYIVQKRETSRLAWTNVATEVQVTKLKVTKLLKGNEYIFRVMAVNKYGVGEPLESEPVLAVDPYGPPDPPKNPEVTTITKDSMVVCWGHPDSDGGSEIINYIVERRDKAGQRWVKCNKKALTDLRFKVSGLTEGHEYEFRIMAENAAGISAPSATSPFYKACDTVFKPGPPGNPRVLDTSRSSISIAWNKPIYDGGSEITGYMVEIALPEEDEWQVVTPPAGLKATSYTITSLIENQEYKIRIYAMNSEGLGEPALVPGTPKAEERMLPPEIELDADLRKVVTIRACCTLRLFVPIKGRPAPEVKWAREHGESLDKASIESTSSYTLLVVGNVNRFDSGKYILTVENSSGSKSAFVNVRVLDTPGPPQNLKIKEVTKTSVTLTWEPPLLDGGSKIKNYIVEKRESTRKAYSTVATNCHKTSWKVDQLQEGCSYYFRVLAENEYGIGLPAETAESVKASERPLPPGKITLTDVTRNSVSLSWEKPEHDGGSRILGYIVEMQSKGQVRNTLSVFAAQNEKGISDPRQTECATFKLLFTIPFTVLAGEDLKIDVPFIGRPPPAVTWHKDDIPLKQTTRVNAESTENNSLLTIKEACREDVGHYTVKLTNSAGEATETLNVIVLDKPGPPTGPVKMDEVTADSVTLSWEPPKYDGGSSINNYIVEKRDTSTTAWQIVSATVARTTIKACRLKTGCEYQFRIAAENRYGKSTYLNSEPVVAQYPFKVPGPPGTPFVTLASKDSMEVQWHEPVSDGGSKVIGYHLERKERNSILWVKLNKTPIPQTKFKTTGLEEGIEYEFRVSAENIVGIGKPSKPSECYAAHDPCDPPGRPEAIIVTRNSVTLQWKKPTYDGGSKITGYIVEKKELPDGRWMKASFTNIIDTQFEVTGLLEDHRYEFRVIARNAAGVFSEPSESTGAITARDEVEPPRISMDPKYRDTVVVQAGESFKIDADIYGKPIPTTQWVKGDQELSSTARLEIKSTDFATSLSVKDAVRVDSGNYILKAKNVAGEKSVTINVKVLDRPGPPEGPVAISGVTAEKCTLAWKPPLQDGGSDITNYIVERRETSRLVWTLVDANVQTLSCKVLKLLEGNEYIFRIMAVNKYGVGEPLESESLIAKNPFVVPDAPKAPEVTAVTKDSMIVVWERPASDGGSEILGYVLEKRDKEGIRWTRCHKRLIGELRLRVTGLLENHNYEFRVSAENAAGLSEPSPPSAYQKACDPIYKPGPPNNPKVMDVTRSSVFLSWTKPIYDGGCEIQGYIVEKCDVSVGEWTMCTPPTGINKTNLEVEKLLEKHEYNFRICAINKAGVGEHADVPGPVMVEEKLEAPDIDLDLELRKVINIRAGGSLRLFVPIKGRPTPEVKWGKVDGDIRDAAIIDVTSSFTSLVLDNVNRYDSGKYTLTLENSSGTKSAFVTVRVLDTPSPPVNLKVTEITKDSVSITWEPPLLDGGSKIKNYIVEKREATRKSYAAVVTNCHKNSWKIDQLQEGCSYYFRVTAENEYGIGLPARTADPIKVAEVPQPPGKITVDDVTRNSVSLSWTKPEHDGGSKIIQYIVEMQAKNTDKWSECARVKSLDAVITNLTQGEEYLFRVIAVNEKGRSDPRSLAVPIIAKDLVIEPDVRPAFSSYSVQVGQDLKIEVPISGRPKPSISWTKDGMPLKQTTRINVTDSLDLTTLSIKETHKDDGGQYGITVSNVVGQKTAAIEIITLDKPDPPKGPVKFDEISAESITLSWNPPLYTGGCQITNYIVQKRDTTTTVWDVVSATVARTTLKVTKLKTGTEYQFRIFAENRYGQSFALESEPVVAQYPYKEPGPPGTPFVTAISKESMVVQWHEPINNGGSPVIGYHLERKERNSILWTKVNKTIIHDTQFKALNLEEGIEYEFRVYAENIVGVGKASKNSECYVARDPCDPPGTPEAIIVKRNEITLQWTKPVYDGGSMITGYIVEKRDLPEGRWMKASFTNVIETQFTVSGLTEDQRYEFRVIAKNAAGAISKPSDSTGPITAKDEVELPRISMDPKFRDTIVVNAGETFRLEADVHGKPLPTIEWLRGDKEIEESARCEIKNTDFKALLIVKDAIRIDGGQYILRASNVAGSKSFPVNVKVLDRPGPPEGPVQVTGVTAEKCTLAWSPPLQDGGSDISHYVVEKRETSRLAWTVVASEVVTNSLKVTKLLEGNKYIFRIMAVNKYGVGEPLESAPVLMKNPFVLPGPPKSLEVTNIAKDSMTVCWNRPDSDGGSEIIGYIVEKRDRSGIRWIKCNKRRITDLRLRVTGLTEDHEYEFRVSAENAAGVGEPSPATVYYKACDPVFKPGPPTNAHVVDTTKNSITLAWSKPIYDGGSEILGYVVEICKADEEEWQIVTPQTGLRVTRFEIAKLIEHQEYKIRVCALNKVGLGEAASVPGTVKPEDKLEAPELDLDSELRKGIVVRAGGSARIHIPFKGRPTPEITWSKEEGEFTDKVQIEKGINFTQLSIDNCDRNDAGKYILKLENSSGSKSAFVTVKVLDTPGPPQNLAVKEVRKDSVLLVWEPPIIDGGAKVKNYVIDKRESTRKAYANVSSKCNKTSFRVENLTEGAIYYFRVMAENEFGVGVPTETSDAVKASEPPSPPGKVTLTDVSQTSASLMWEKPEHDGGSRILGYVVEMQPKGTEKWSVVAESKVCNAVVSGLSSGQEYQFRVKAYNEKGKSDPRVLGIPVIAKDLTIQPSFKLPFNTYSVQAGEDLKIEIPVIGRPRPKISWVKDGEPLKQTTRVNVEETATSTILHIKESSKDDFGKYSVTATNSAGTATENLSVIVLEKPGPPVGPVKFDEVSADFVVISWEPPAYTGGCQISNYIVEKRDTTTTNWQMVSATVARTTIKISKLKTGTEYQFRIFAENRYGKSTPLDSKPVVVQYPFKEPGPPGTPFVTSISKDQMLVQWHEPVNDGGSKVTGYHLEQKEKNSILWVKLNKIPIQDTKFKTTGLDEGLEYEFRVSAENIVGIGKPSKVSECYVARDPCDPPGRPEAIVITRNSVTLKWKKPVYDGGSKITGYIVEKKDLPDGRWMKASFTNVVETEFTVTGLVEDQRYEFRVIARNAADNFSEPSESSGAITARDEIDAPNASLDPKYRDVIIVHAGETFVLEADIRGKPIPDIIWSKDGNELEETAARMEIKSTLQKTTLIVKDCIRTDGGQYTLKLSNVGGTKTIPITVKVLDRPGPPEGPLKVTGVTAEKCYLAWNPPLQDGGASISHYIIEKRETSRLSWTQVSNEVQALNYKVTKLLPGNEYIFRVMAVNKYGIGEALESEPVIACNPYKRPGPPSTPEASAITKDSMVLTWTRPVDDGGAEIEGYILEKRDKEGIRWTKCNKKTLTDLRFRVTGLTEGHSYEFRVAAENAAGVGEPSEPSVFYRACDALYPPGPPSNPKVTDTSRSSVSLAWNKPIYDGGAPVRGYVIELKKAAADEWTTCTPPSGLQGKQFTVTKLKENTEYNFRICAFNTEGVGEPATIPGSVVAQERMEAPEIELDADLRKVVTLRASATLRLFVTIKGRPEPEVKWEKAEGILTERAQIEVTSSYTMLVIDNVTRFDSGRYNLTLENNSGSKTAFVNVRVLDSPSAPVNLTIREVKKDSVTLSWEPPLIDGGAKITNYIVEKRETTRKAYATITNNCTKNTFKIENLQEGCSYYFRVLASNEYGIGLPAETAEPVKVSEPPLPPGRVTLVDVTRNTATIKWEKPESDGGSKITGYVVEMQTKGSEKWSACTQVKTLETTISGLTAGEEYVFRVAAVNEKGRSDPRQLGVPVIAKDIEIKPSVELPFNTFNVKANDQLKIDIPFKGRPQATVAWKKDGQVLRETTRVNVASSKTVTTLSIKEASREDVGTYELCVSNTAGSITVPITVIVLDRPGPPGPIRIDEVSCDNVSISWNPPEYDGGCQISNYIVEKRETTSTTWQVVSQAVARTSIKIVRLTTGSEYQFRVCAENRYGKSSYSESSAVVAEYPFSPPGPPGTPKVVHATKSTMVVSWQVPVNDGGSQVIGYHLEYKERSSILWSKANKVLIADTQMKVSGLDEGLMYEYRVYAENIAGIGKCSKACEPVPARDPCDPPGQPEVTNITRKSVSLKWSKPRYDGGAKITGYIVERRELPDGRWLKCNFTNVQETYFEVTELTEDQRYEFRVFARNAADSVSEPSESTGPITVKDDVEAPRIMMDVKFRDVIIVKAGEVLKINADIAGRPLPVISWAKDGVEIEERAKTEIVSTDYTTTLTVKDCVRRDTGQYVLTLKNVAGTRTMAVNCKVLDKPGPPAGPLEINGLTAEKCSLSWGRPQEDGGADIDYYIVEKRETSRLAWTICEAELRTTSCKVTKLLKGNEYIFRVTGVNKYGVGEPLESMAVKALDPFTTPSPPTSLEITSVTKDSMTLCWSRPETDGGSDISGYIIERREKNSLRWMRVNKKPVYDLRVKSTGLREGCEYEYRVFAENAAGLSLPSETSPLVRAEDPVFLPSPPSKPKIVDSGKTTITIGWVKPLFDGGAPITGYTVEYKKSEETDWKVAIQSFRGTEYTMSGLTTGDEYVFRVRSLNKMGASDPSDSSDPQVAKEREEEPVFDVDSEMRKTLIVKAGSSFTMTVPFRGRPIPNVSWSKPDTDLRTRAYIDSTDSRTLLTIENANRNDSGKYTLTIQNVLSAASMTFVVKVLDSPGPPANITVREVTKETAMLSWDVPENDGGAPVKNYHIEKREASKKAWVSVTNNCNRLSYKVTNLQEGAIYYFRVSGENEFGVGVPAETKEGVKITEKPSPPEKLGVTSVSKDSVSLSWLKPEHDGGSRIIHYVVEALEKGQKTWVKCAVVKTTHHVVSGLRESHEYFFRVFAENQAGLSDPRELLLPVLIKDQLEPPEIDMKNFPSHTVYVRAGSNLKVDIPISGKPLPKVTLSRDGVPLKATMRFNTEITAENLTINLKESVTTDAGRYEITAANSSGTTKTFINIIVLDRPGPPTGPVAISDITEESVTLKWEPPKYDGGSHVTNYIVLKRETSTAVWSEVSATVARTMIKVMKLTTGEEYQFRIKAENRFGISDHIDSVCVVVKLPYTTPGPPSTPWVSNVTRESITVGWHEPVSNGGSAVTGYHLEMKDRNSILWQKANKMIIRTTHFKVTTISAGLIYEFRVYAENAAGIGKPSHPSEPVLAIDACEPPRNVRITDISKNSVNLSWQQPAFDGGSKITGYIVERRDLPDGRWTKASFTNVIETQFTVSGLTQNSQYEFRVFARNAVGSVSNPSEVVGPITCIDSYGGPVIDLPLEYTEVVKYRAGTSVKLRAGISGKPEPTIEWYKDDKELQTNALVCVENSTDLASILIKDANRLNSGSYELKLRNAMGSASATIRVQILDKPGPPGGPIEFKTVTAEKITLLWRPPADDGGAKITHYIVEKRETSRVVWSMVAENLEECIVTTTKIIKGNEYVFRVRAVNKYGIGEPLESEPVVAKNAFVTPGPPSIPEVTKITKNSMTVVWDRPTVDGGSEINGYFLERRDKKSLAWLKVLKETIRDTRQKVTGLTENSDYQYRVCAVNAAGVGPFSEPSDFYKAADPIDPPGPPAKIRIADSTKSSITLGWSKPVYDGGSDVTGYVVEMKQGDEEEWTIVSTRGEVRTTEYVVSNLKPGVNYYFQVSAVNCAGQGEPITMTEPAQAKDVLEEPEIDLDVALRTSVIAKAGEDVQLLIPFKGRPPPTVTWRKDEKNLGSDTRYSIQNTDSSSLLVIPQVTRNDTGKYILTIENGVGQPKSSTVSVKVLDTPAACQKLQVKHVSLGTVTLLWDPPLIDGGSPIINYVIEKRDATKRTWSVVSHKCSGTSFKVTDLSEKTPFFFRVLAENEIGIGEPCETTEPVKAAEVPAPIRDLSMKDSTKTSVVLSWTKPDFDGGSIITDYLVERKGKGEQAWSHAGISKTCEIEIGQLKEQSVLEFRVSARNEKGQSDPVTIGPLTVKELVITPEVDLSEIPGAQISVRIGHNVHLELPYKGKPKPSISWLKDGLPLKESEYVRFSKTENKITLSIKNSKKEHGGKYTVILDNAVCRNSFPITIITLGPPSKPKGPIRFDEIKADSAIMSWDIPEDDGGGEITCYSIEKREASQTNWKMVCSSVARTTFKVSNLVKDSEYQFRVRAENRYGVSEPLASNIIVAKHQFRIPGPPGKPVIYNVTSDGMSLTWDAPVYDGGSEVTGFHVEKKERNSILWQRVNTSPISGREYRATGLIEGLDYQFRVYAENSAGLSSPSDPSKFTLAVSPVDPPGTPDYIDVTRETITLKWNPPLRDGGSKIVAYSIEKRQGSDRWVRCNFTDVSECQYTVTGLSPGDRYEFRIIARNAVGTISPPSQSSGLIMTRDENVPPTVEFGPEYFDGLVIKSGDSLRIKALVQGRPVPRVTWFKDGVEIERRMNMEITDVLGSTSLFVRDATRDHRGVYTVEAKNVSGSTKAEVTVKVQDTPGKVVGPIRFTNITGEKMTLWWEAPLNDGCAPVTHYIIEKRETSRLAWALIEDNCEALSYTAIKLITGNEYQFRISAVNKFGVGRPLESDPVVAQIQYTIPDAPGVPEPSNVTGNSITLTWTRPESDGGSEIQHYILERREKKSTRWVKVISKRPISETRFKVTGLVEGNEYEFHVMAENAAGIGPASGISRLIKCREPVNPPSAPSVVKVTDTSKTTVSLEWARPVFDGGMEIIGYIIEMCKADLGDWHKVNTEPCVKTRYTVTDLQAGEEYKFRVSAVNGAGKGDSCEVTGTIKAVDRLSAPELDIDANFKQTHIVRAGVSIRLFIAYQGRPTPTAVWSKPDSNLSIRADIHTTDSFSTLTVENCNRNDAGKYTLTVENNSGKKSITFTVKVLDSPGPPGPITFKDVTRGSATLMWDAPLLDGGARIHHYVIEKREASRRSWQVVSEKCTRQILKVSELTEGVPYYFRVSAENEYGVGEPYEMPEPIVATEQPAPPRRLDVVDTSKSSAVLAWLKPDHDGGSRITSYLLEMRQKGSDFWVEAGHTKQLTFTVERLVENTEYEFRVKAKNDAGYSEPREAFSSVIIKEPQIEPTADLTGITNQLITCKAGSTFTIDVPISGRPAPKVTWKLEEMRLKETDRMSIATTKDRTTLTVKDSMRGDSGRYFLTLENTAGVKTFTITVVVIGRPGPVTGPIEVSSVSAESCVLSWTEPKDDGGTEITNYIVEKRESGTTAWQLINSSVKRTQIKVTHLTKYKEYCFRVSSENRFGVSKPLESVPIVAEHPFVPPSAPTRPEVYYVSANAMSIRWEEPYHDGGSKIVGYWVEKKERNTILWVKENKVPCLECNYKVTGLVEGLEYQFRTYALNAAGVSKASEASRPIMAQNPVDPPGRPEVTDVTRSTVSLIWSAPVYDGGSKVVGYIIERKPVSEVGDGRWLKCNYTIVSDNFFTVTALSEGDTYEFRVLAKNAAGVISKGSESTGPVTCRDEYAPPKAELDARLQGDLVTIRAGSDLVLDAAVGGKPEPKIIWTKGDKELDLCEKISLQYTGKRATAVIKYCDRSDSGKYTLTVKNASGTKSVSVMVKVLDSPGPCGKLTVSRVTEEKCTLAWSLPQEDGGAEITHYIVERRETSRLNWVIVEGECLTASYVVTRLIKNNEYTFRVRAVNKYGLGVPVESEPIVARNSFTIPSQPGIPEEVGAGKEHIIIQWTKPESDGGNEISNYLVDKREKKSLRWTRVNKDYVVYDTRLKVTSLMEGCDYQFRVTAVNAAGNSEPSEASNFISCREPSYTPGPPSAPRVVDTTKRSISLAWTKPMYDGGTDIIGYVLEMQEKDTDQWCRVHTNATIRNNEFTVPDLKMGQKYSFRVAAVNAKGMSDYSETTAEIEPVERLEIPDLELADDLKKTVIVRAGASLRLMVSVSGRPSPVITWSKKGIDLANRAIIDNTESYSLLIVDKVNRYDAGKYTIEAENQSGKKSATVLVKVYDTPGPCPSVSVKEVSRDSVTITWEIPTIDGGAPVNNYIIEKREAAMRAFKTVTTKCSKTLYRISGLVEGTMYYFRVLPENIYGIGEPCETSDAVLVSEVPLVPTKLEVVDVTKSTVTLAWEKPLYDGGSRLTGYVLEACKAGTERWMKVVTLKPTVLEHTVISLNEGEQYLFRVRAQNEKGVSEPREIVTPVTVQDLRVLPTIDLSTMPQKTIHVPAGRPIELVIPITGRPPPTASWFFAGSKLRESERVTVETHTKVTKLTIRETTIRDTGEYTLELKNVTGTTSETIKVIILDKPGPPTGPIKIDEIDATSVTISWEPPELDGGAPLSGYVVEQRDAHRPGWLPVSESVTRPTFKFTRLTEGNEYVFRVAATNRFGIGSYLQSEVIECRSSISIPGPPETLQIFDVSRDGMTLTWYPPEDDGGSQVTGYIVERKEVRADRWVRVNKVPVTMTRYRSTGLIEGLEYEHRVTAINARGTGKPSRPSKPTVAMDPIAPPGKPQNPRVTDTTRTSVSLAWSVPEDEGGSKVTGYLIEMQKVDQREWTKCNTTPTKIREYTLTHLPQGAEYRFRVLACNAGGPGEPAEVPGTVKVTEMLEYPDYELDERYQEGVFVRQGGVIRLTIPIKGKPFPVCKWTKEGQDISKRAMIATSETHTELVIKEADRNDSGTYDLVLENKCGKKTVYIKVKVIGSPNTPEGPLEYDDIQARSVRVSWRPPADDGGADILGYILERREVPKAAWYTIDSRVRGTSLVVKGLKENVEYHFRVSAENQFGISKPLKSEEPVIPKTPLNPPEPPSNPPEVLDVTKSSVSLSWSRPKDDGGSRVTGYYIERKETSTDKWVRHNKTQITTTMYTVTGLVPDAEYQFRIIAQNDVGLSETSPASEPVVCKDPFDKPSQPGELEILSISKDSVTLQWEKPECDGGKEILGYWVEYRQSGDSAWKKSNKERIKDRQFTIGGLLEATEYEFRVFAENETGLSRPRRTAMSVKTKLTSGEAPGVRKEMADVTTKLGEAAQLSCQIVGRPLPDIKWYRFGKELIQSRKYKMSSDGRTHTLTVMTDEQEDEGVYTCVATNEVGEVESSSKLLLQAAPQFHPGYPLKEKYYGAVGSTLRLHVMYIGRPVPAMTWFHGQKLLQNSEKITIENTEHYTHLVMKNVQRKTHAGKYKVQLSNAFGTVDATLDVEIQDKPDKPTGPIVIEALLKNSVVISWKPPADDGGSWITNYVVEKCEAKEGAEWQLVSSAISVTTCRIVNLTENAGYYFRVSAQNTFGISEPLEVASIVIIKSPFEKPGVPGKPTITAVTKDSCVVAWKPPASDGGAKIRNYYLERREKKQNKWIAVTTEEIRETVFSVQNLIEGLEYEFRVKCENLGGESEWSEISEPVTPKSDVPIQAPHFKEELRNLNVRYQSNATLVCKVTGHPKPIVKWYRQGKEIIADGLKYRIQEFKGGYHQLIIASVTDDDATVYQVRATNQGGSVSGTASLEVEVPAKIHLPKTLEGMGAVHALRGEVVSIKIPFSGKPDPVITWQKGQDLIDNNGHYQVIVTRSFTSLVFSNGVERKDAGFYVVCAKNRFGIDQKTVELDVADVPDPPRGVKVSDVSRDSVNLTWTEPASDGGSKVTNYIVEKCATTAERWLRVGQARETRYTVINLFGKTSYQFRVIAENKFGLSKPSEPSEPTVTKEDKTRAMNYDDEVDETREVTTTKASHSKTKELYEKYMIAEDLGRGEFGIVHRCVETSSKRTFMAKFVKVKGTDQVLVKKEISILNIARHRNILYLHESFESMEELVMIFEFISGLDIFERINTSAFELNEREIVSYVRQVCEALEFLHSQNIGHFDIRPENIIYQTRKNSTIKIIEFGQARQLKPGDNFRLLFTAPEYYAPEVHQHDVVSTATDMWSLGTLVYVLLSGINPFLAETNQQMIENIMNAEYTFDEEAFKEISLEAMDFVDRLLVKERKSRMTASEALQHPWLKQRIDRVSTKVIRTLKHRRYYHTLIKKDLNMVVSAARISCGGAIRSQRGVSVAKVKVASIEIGPVSGQIMHAIGEEGGYVKYVCKIENYDQSTQVTWYFGVRQLENSEKYEITYEDGVATMYVKDITKFDDGTYRCKVVNDYGEDSSYAELFVKGVREVYDYYCRRTKKVKRRTDAMRLLERPPEFTLPLYNKTAYVGENVRFGVTITVHPEPRVTWYKSGQKIKPGDDEKKYTFESDKGLYQLTINSVTTDDDAEYTVVARNKHGEDSCKAKLTVTLHPPPTETTLRPMFKRLLANAECHEGQSVCFEIRVSGIPAPTLKWEKDGQPLSLGPHIEIVHEGLDYYALHIRDTLPEDTGYYRVTATNTAGSTSCQAHLQVERLRYVKQEFQSKEERERHVQKQIDKTLRMAEILSGTETVPLTPVAQEALREAAILYKPAVSTKTVKGEYRLQTEEKKEERKLRMPYEVPEPRRFKQATVEEDQRIKQFVPMSDMKWYKKIRDQYEMPGKLDRVVQKRPKRIRLSRWEQFYVMPLPRITDQYRPKWRIPKLTQDDLEMVRPARRRTPSPDYDLYYYRRRRRSLGDMSDEELLLPIDDYLAMKRTEEERLRLEEELELGFSASPPSRSPPRFELSSLRYSSPPAHVKVEDRRRDFRYSTYHVPTKEETSTSYAELRERHAQASYRQPKLRQRIMAEKEEEELLRPVTTTQRLSEYKSELDYMSKEEKSKKKSKRQRQVTEITEIEEEYEISRRAQRESSSSVSRLLRRRRSLSPTYIELMRPVSELIRSHPRPAEEYEDDAERRSPTPERTRPRSPSPVSSERSLSRFERSARFDIFSRYESMKAALKTQKTSERKYEVLSQQPFTLDHAPRITLRMRSHRVPCGQNTRFILNVQSKPTAEVKWYHNGVELQESSKIHYTNTSGVLTLEILDCQTEDGGTYRAVCTNYKGEASDYATLDVTGGAYTTYASQRRDEEVPKSVFPELTKTEAYAVSSFKRTSELEAASSVREVKSQMTETRESLSTYEHYASAEMKSATSEEKSLEEKATVRKIKTTLAARILTKPRSITVHEGESARFSCDTDGEPVPTVTWLREGQVVSTSARHQVTTTKYKSTFEISSVQASDEGNYSVVVENSDGKQEAQFTLTVQKARVIEKAVTSPPRVKSPEPRVKSPETVKSPKRVKSPEPVTSHPKAVSPTETKPTEKGQHLPVSAPPKITQSLKAEASKDIAKLTCAVESSALCAKEVAWYKDGKKLKENGHFQFHYSADGTYELKIHNLSESDCGEYVCEVSGEGGTSKTSFQFTGQSFKSIHEQVSSISETTKSVQKTAESAEAKKSAQKTAESVEDKKAAQKTVESAEAKKPAQKTAESPEAKKPAQKTAESPEAKKQEPIAPESISSKPVIVTGLRDTTVSSDSVAKFTIKVTGEPQPTITWTKDGKAIAQGSKYKLSSNKEEFILEILKTETSDGGLYACTVTNSAGSVSSSCKLTIKAVKDTEAQKVSTQKTSEVTSQKKASAQEEISQKALTSEEIKMSEVKSHETLAIKEEASKVLIAEEVKRSAAASLEKSIVHEEVTKTSQASEEVKTHAEIKTLSTQMNITKGQRATLKANIAGATDVKWVLNGTELPNSEEYRYGVSGSDQTLTIKQASHREEGILSCIGKTSQGVVKCQFDLTLSEELSDAPSFITQPRSQNINEGQNVLFSCEVSGEPSPEIEWFKNNLPISISSNISVSRSRNVYTLEIRNAAVSDSGKYTIKAKNFHGQCSATASLTVLPLVEEPPREVVLKTSSDVSLHGSVSSQSVQMSASKQEASFSSFSSSSASSMTEMKFASMSAQSMSSMQESFVEMSSSSFMGKSSMTQLESSTSRMLKAGGRGIPPKIEALPSDISIDEGKVLTVACAFTGEPTPEITWSCGGRKIQNQEQQGRFHIENTDDLTTLIIMDVQKQDGGLYTLSLGNEFGSDSATVNINIRSM

SEQ ID NO: 156 - protein, 613 aa, Mus musculus
MTTENGAVELGSQSLSTEQTPKAAAGDGPSASEKEPSAPATEKDLSPPNAKKDPGAPDPKNNPDPPSLKKDPAKAPGPEKKGDPVPASASSQGPSGEGDGGGGPAEGSEGPPAALPLPTATAEASIQKLDPTQAPSGNQGSGEAKAGKKAAECREAGRRGSPAFLHSPSCPAIISCSEKTLAVKPLSETTDLVFTGVSVTPDPQDPGPVKAGGTNALAEKKKEEAEKASGQAGQAKVQGDTPQRIGFQAVPSERVEVGQALCLTAREEDCFQILDDCPPPPAPFPHRIVELRTGNVNSEFSMNSKEALGGGKFGAVCTCTERATGLKLAAKVIKKQTPKDKEMVLLEIEVMNQLNHRNLIQLYAAIETSHEIILFMEYIEGGELFERIVDEDYHLTEVDTMVFVRQICDGILFMHKMRVLHLDLKPENILCVNTTGHLVKIIDFGLARRYNPNEKLKVNFGTPEFLSPEVVNYDQISDKTDMWSLGVITYMLLSGLSPFLGDDDTETLNNVLSANWYFDEETFEAVSDEAKDFVSNLLTKDQSARMSAEQCLAHPWLNNLAEKAKRCNRRLKSQILLKKYLMKRRWKKNFIAVSAANRFKKISSSGALMALGV

SEQ ID NO: 157 - protein, 390 aa, Mus musculus
MLKVKRLEEISSCHSSNPLEKVAFFQCMEEVEKVKCFLEENSGDLDLQSGDNEENVWSNRALDERIIVKGGRTSALTDDIPAPAAPFDHRMVMAKHASVDNLYTVSKSEILGGGRFGQVHKCEEKATGLKLAAKIIKTRGAKDKEDVKNEISVMNQLDHVNLIQLYDAFESKHDIILVMEYVEGGELFDRIIDENCNLTELDTILFMKQICEGIRYMHQMYILHLDLKPENILCVNRDAKQIKIIDFGLARRYKPREKLKVNFGTPEFLAPEVVNYDFVSFSTDMWSVGVITYMLLSGLSPFLGDNDAETLTNILACRWDLEDEEFQDISEEAKEFISKLLIKEKSWRISASEALKHPWLSDHKLHSRLSAQVTMFPVSSLLAICLSHQM

SEQ ID NO: 158 - protein, 411 aa, Mus musculus
LARIGWGTAGAASGLIKARWAGLSRRATLPGGACPGSVALGLARATNLNAAPSAGASGPPDSLPSTLAPPSPGSPAALPRASTPCGLSGFSGLNIRSTSSMLTKPLQGHPSPPVTPTQPPGGKDRAAFEAEYRLGPLLGKGGFGTVFAGHRVTDRRQVAIKVISRNRVLGWSTVSDSVTCPLEVALLWKVGEGNGHPGVIRLLDWFETPEGFMLVLERPMPAQDLFDYITEKGPLGESCSRSFFTQVVAAVQHCHARGVVHRDIKDENILIDLCRGSIKLIDFGSGALLHDEPYTDFDGTRVYSPPEWISRHQYHALPATVWSLGVLLYDMVCGDIPFERDQEILEAELHFPAHVSPDCCALIRRCLAPKPCSRPSLEEILLDPWMQSPAEEKPINSSKGSPTPLPWSLLP

SEQ ID NO: 159 - protein, 3103 aa, Mus musculus
  misc_feature (502)..(578): Xaa can be any naturally occurring amino acid
MSGSSGGATAPAASSGPAAAASAAGSGCGGGAGEGAEEAAKDLADIAAFFRSGFRKNDEMKAMDVLPILKEKVAYLSGGRDKRGGPILTFPARSNHDRIRQEDLRRLISYLACIPSEEVCKRGFTVIVDMRGSKWDSIKPLLKILQESFPCCIHIALIIKPDNFWQKQRTNFGSSKFEFETNMVSLEGLTKVVDPSQLTPEFDGCLEYNHEEWIEIRVAFEEYISNAAHMLSRLEELQDVLAKKELPQDLEGARNMIDEHSQLKKKVIKAPIEDLDLEGQKLLQRIQSSDSFPKKNSGSGNADLQNLLPKVSTMLDRLHSTRQHLHQMWHVRKLKLDQCFQLRLFEQDAEKMFDWITHNKGLFLNSYTEIGTSHPHAMELQTQHNHFAMNCMNVYVNINRIMSVANRLVESGHYASQQIKQIANQLEQEWKAFAAALDERSTLLDMSSIFHQKAEKYMSNVDSWCKACGEVDLPSELQDLEDAIHHHQGIYEHITLAYSEVXXXXXXXXXXXXXXXXXXXXXXXXXXXXXXXXXXXXXXXXXXXXXXXXXXXXXXXXXXXXXXXXXXXXXXXXXXXXXLDWIENHGEAFLSKHTGVGKSLHRARALQKRHEDFEEVAQNTYTNADKLLEAAEQLAQTGECDPEEIYQAAHQLEDRIQDFVRRVEQRKILLDMSVSFHTHVKELWTWLEELQKELLDDVYAESVEAVQDLIKRFGQQQQTTLQVTVNVIKEGEDLIQQLRDSAISSNKTPHNSSINHIETVLQQLDEAQSQMEELFQERKIKLELFLQLRIFERDAIDIISDLESWNDELSQQMNDFDTEDLTIAEQRLQHHADKALTMNNLTFDVIHQGQDLLQYVNEVQASGVELLCDRDVDMATRVQDLLEFLHEKQQELDLAAEQHRKHLEQCVQLRHLQAEVKQVLGWIRNGESMLNAGLITASSLQEAEQLQREHEQFQHAIEKTHQSALQVQQKAEAMLQANHYDMDMIRDCAEKVASHWQQLMLKMEDRLKLVNASVAFYKTSEQVCSVLESLEQEYKREEDWCGGADKLGPNSETDHVTPMISKHLEQKEAFLKACTLARRNADVFLKYLHRNSVSMPGMVTHIKAPEQQVKNILNELFQRENRVLHYWTMRKRRLDQCQQYVVFERSAKQALEWIHDNGEFYLSTHTSTGSSIQHTQELLKEHEEFQITAKQTKERVKLLIQLADGFCEKGHAHAAEIKKCVTAVDKRYRDFSLRMEKYRTSLEKALGISSDSNKSSKSLQLDIIPASIPGSEVKLRDAAHELNEEKRKSARRKEFIMAELIQTEKAYVRDLRECMDTYLWEMTSGVEEIPPGIVNKELIIFGNMQEIYEFHNNIFLKELEKYEQLPEDVGHCFVTWADKFQMYVTYCKNKPDSTQLILEHAGSYFDEIQQRHGLANSISSYLIKPVQRITKYQLLLKELLTCCEEGKGEIKDGLEVMLSVPKRANDAMHLSMLEGFDENIESQGELILQESFQVWDPKTLIRKGRERHLFLFEMSLVFSKEVKDSSGRSKYLYKSKLFTSELGVTEHVEGDPCKFALWVGRTPTSDNKIVLKASSIENKQDWIKHIREVIQERTVHLRGALKEPIHIPKTAPAARQKGRRDGEDLDSQGDGSSQPDTISIASRTSQNTLDSDKLSGGCELTVVIHDFTACNSNELTIRRGQTVEVLERPHDKPDWCLVRTTDRSPAAEGLVPCGSLCIAHSRSSMEMEGIFNHKDSLSVSSNDASPPASVASLQPHMIGAQSSPGPKRPGNTLRKWLTSPVRRLSSGKADGHAKKLAHKHKKSREVRKSADAGSQKDSDDSAATPQDETIEERGRNEGLSSGTLSKSSSSGMQSCGEEEGEEGADAVPLPPPMAIQQHSLLQPDSQDDKASSRLLVRPTSSETPSAAELVSAIEELVKSKMALEDRPSSLLVDQGDSSSPSFNPSDNSLLSSSSPIDEMEERKCSSLKRRHYVLQELVETERDYVRDLGCVVEGYMALMKEDGVPDDMKGKDKIVFGNIHQIYDWHRDFFLGELEKCLEDPEKLGSLFVKHERRLHMYIVYCQNKPKSEHIVSEYIDTFFEDLKQRLGHRLQLTDLLIKPVQRIMKYQLLLKDFLKYSKKASLDTSELEKAVEVMCIVPKRCNDMMNVGRLQGFDGKIVAQGKLLLQDTFLVTDQDAGLLPRCKERRVFLFEQIVIFSEPLDKKKGFSMPGFLFKNSIKVSCLCLEENVESDPCKFALTSRTGDAVETFVLHSSSPSVRQTWIHEINQILENQRNFLNALTSPIEYQRNHSGGGGSGSGGSSGGGGGSGGSGASSGGSSSHGSGPSSCSSGPSSSRSRPSRIPQPVRHHPPMLVSSAASSQAEADKMSGMSAPSPSLPTPSSSLALEASLGQPSRLPLSGDSEGHERETEPIPKMKVMESPRKAPGSTSGTSQDGNTKDARGNLGSLPLGKTRPGAVSPLNSPLSTTFPSPFGKEAFPPSSPLQKGGSFWSSIPASPASRPSSFTFPGDSDSLQRQTHRHAAPSKDTDRMSTCSSASEQSVQSTQSNGSEGSSSSNISTMLVTHEYTAVKEDEINVYQGEVVQILASNQQNMFLVFRAATDQCPAAEGWIPGFVLGHTSAVIMENPDGTLKKSTSWHTALRLRKKSEKKDKDGKRDGKLENGYRKPREGLSNKVSVKLLNPNYIYDVPPEFVIPLSEVTCETGETVVFRCRVCGRPKASITWKGPEHNTLNNDDHYSISYSDIGEATLKIIGVSTEDDGIYTCIAVNDMGSASSSASLRVLGPGSDGIVVTWKDNFDAFYSEVAELGRGRFAVVKKCDQKGTKRAVATKFVNKKLMKRDQVTHELGILQNLQHPLLVSLLDTFETPTSYVLVLEMADQGRLLDCVVRWGSLTEGKVRAHLGEVLEAVRYLHNCRIAHLDLKPENILVDQSLAKPTIKLADFGDAVQLNTTYYIHQLLGNPEFAAPEIILGNPVSLTADTWSVGVLTYVLLSGVSPFLDDSVEETCLNICRLDFSFPEDYFQGVSQKAKEFVCFLLQEDPAKRPSAALALQEQWLQAGNGSGKGTGVLDTSRLTSFIERRKHQNDVRPIRSIKNFLQSRLLPRV

SEQ ID NO: 160 - protein, 2966 aa, Mus musculus
  misc_feature (2536)..(2541): Xaa can be any naturally occurring amino acid
  misc_feature (2584)..(2596): Xaa can be any naturally occurring amino acid
GSFRNDGLKASDVLPILKEKVAFVSGGRDKRGGPILTFPARSNHDRIRQEDLRKLVTYLASVPSEDVCKRGFTVIIDMRGSKWDLIKPLLKTLQEAFPAEIHVALIIKPDNFWQKQKTNFGSSKFIFETSMVSVEGLTKLVDPSQLTEEFDGSLDYNHEEWIELRLSLEEFFNSAVHLLSRLEDLQEMLARKEFPVDVEGSRRLIDEHTQLKKKVLKAPVEELDREGQRLLQCIRCSDGFSGRNCIPGSADFQSLVPKITSLLDKLHSTRQHLHQMWHVRKLKLDQCFQLRLFEQDAEKMFDWISHNKELFLQSHTEIGVSYQHALDLQTQHNHFAMNSMNAYVNINRIMSVASRLSEAGHYASQQIKQISTQLDQEWKSFAAALDERSTILAMSAVFHQKAEQFLSGVDAWCKMCSEGGLPSEMQDLELAIHHHQSLYEQVTQAYTEVSQDGKALLDVLQRPLSPGNSESLTATANYSKAVHQVLDVVHEVLHHQRRLESIWQHRKVRLHQRLQLCVFQQDVQQVLDWIENHGEAFLSKHTGVGKSLHRARALQKRHDDFEEVAQNTYTNADKLLEAAEQLAQTGECDPEEIYKAARHLEVRIQDFVRRVEQRKLLLDMSVSFHTHTKELWTWMEDLQKEVLEDVCADSVDAVQELIKQFQQQQTATLDATLNVIKEGEDLIQQLRSAPPSLGEPTEARDSAMSNNKTPHSSSISHIESVLQQLDDAQVQMEELFHERKIKLDIFLQLRIFEQYTIEVTAELDAWNEDLLRQMNDFNTEDLTLAEQRLQRHTERKLAMNNMTFEVIQQGQDLHQYIMEVQASGIELICEKDLDLAAQVQELLEFLHEKQHELELNAEQTHKRLEQCLQLRHLQAEVKQVLGWIRNGESMLNASLVNASSLSEAEQLQREHEQFQLAIESLFHATSLQKTHQSALQVQQKAEALLQAGHYDADAIRECAEKVALHWQQLMLKMEDRLKLVNASVAFYKTSEQVCSVLESLEQEYRRDEDWCGGRDKLGPAAEMDHVIPLLSKHLEQKEAFLKACTLARRNAEVFLKYIHRNNVSMPSVASHTRGPEQQVKILSELLQRENRVLHFWTLKKRRLDQCQQYVVFERSAKQALDWIQETGEYYLSTHTSTGETTEETQELLKEYGEFRVPAKQTKEKVKLLIQLADSFVEKGHIHATEIRKWVTTVDKHYRDFSLRMGKYRYSLEKALGVNTEDNKDLELDIIPASLSDREVKLRDANHEINEEKRKSARKKEFIMAELLQTEKAYVRDLHECLETYLWEMTSGVEEIPPGILNKEHIIFGNIQEIYDFHNIFLKELEKYEQLPEDVGHCFVTWADKFQMYVTYCKNKPDSNQLILEHAGTFFDEIQQRHGLANSISSYLIKPVQRVTKYQLLLKELLTCCEEGKGELKDGLEVMLSVPKKANDAMHVSMLEGFDENLDVQGELILQDAFQVWDPKSLIRKGRERHLFLFEISLVFSKEIKDSSGHTKYVYKNKLLTSELGVTEHVEGDPCKFALWSGRTPSSDNKTVLKASNIETKQEWIKNIREVIQERIIHLKGALKEPIQLPKTPAKLRNNSKRDGVEDGDSQGDGSSQPDTISIASRTSQNTVESDKLSGGCELTVVLQDFSAGHSSELSIQVGQTVELLERPSERPGWCLVRTTERSPPQEGLVPSSALCISHSRSSVEMDCFFPLKDSYSHSSSENGGKSESVAHLQSQPSLNSIHSSPGPKRSTNTLKKWLTSPVRRLNSGKADGNIKKQKKVRDGRKSFDLGSPKPGDETTPQGDSADEKSKKGWGEDEPDEESHTPLPPPMKIFDNDPTQDEMSSLLAARQAPPDVPTAADLVSAIEKLVKNKLTLEGGSYRGSLKDPTGCLNEGMTPPTPPRNLEEEQKAKALRGRMFVLNELVQTEKDYVKDLGIVVEGFMKRIEEKGVPEDMRGKEKIVFGNIHQIYDWHKDFFLAELEKCIQEQDRLAQLFIKHERKLHIYVWYCQNKPRSEYIVAEYDAYFEEVKQEINQRLTLSDFLIKPIQRITKYQLLLKDFLRYSEKAGLECSDIEKAVELMCLVPKRCNDMMNLGRLQGFEGTLTAQGKLLQQDTFYVIELDAGMQSRTKERRVFLFEQIVIFSELLRKGSLTPGYMFKRSIKMNYLVLEDNVDGDPCKFALMNRETSERVILQAANSDIQQAWVQDINQVLETQRDFLNALQSPIEYQRKERSTAVIRSQPPRVPQASPRPYSSGPVGSEKPPKGSSYNPPLPPLKISTSNGSPGFDYHQPGDKFDASKNDLGGCNGTSTMTVIKDYYALKENEICVSQGEVVQVLAVNQQNMCLVYQPASDHSPAAEGWVPGSILAPLAKATAAAESSDGSIKKSCSWHTLRMRKRADVENSGKNEATGPRKPKDILGNKVSVKETNSSEESECDDLDPNTSMEVLNPNFIQEVAPEFLVPLVDVTCLLGDTVLLQCKACGRPKPSITWKGPDQNILDTDNSSATYTISSCDSGESTLKICNLMPQDSGIYTCLAANDHGTASTSAXXXXXXVPAAPNRPIAQERSCTSVILRWLPPASTGNCTISGYTVEYREXXXXXXXXXXXXXLGTYLVLEDLSPGCPYQFRVSASNPWGISLPSEPSEFVRLPEYDAAADGATISWKENFDSAYTELNEIGRGRFSIVKKCIHKATRKDVAVKFVSKKMKKKEQAAHEAALLQHLQHPQYVTLHDTYESPTSYILILELMDDGRLLDYLMNHDELMEEKVAFYIRDIMEALQYLHNCRVAHLDIKPENLLIDLRIPVPRVKLIDLEDAVQISGHFHIHHLLGNPEFAAPEVIQGIPVSLGTDIWSIGVLTYVMLSGVSPFLDESKEETCINVCRVDFSFPHEYFCGVSNAARDFINVILQEDFRRRPTAATCLQHPWLQPHNGSYSKIPLDTSRLACFIERRKHQNDVRPIPNVKSYIVNRVNQGTSLSHNP

SEQ ID NO: 161 - protein, 3262 aa, Mus musculus
MQKARGTRGEDAGTRAPPSPGVPPKRAKVGAGRGVLVTGDGAGAPVFLRPLKNAAVCAGSDVRLRVVVSGTPQPSLSWFRDGQLLPPPAPEPSCLWLRSCGAQDAGVYSCSAQNERGQASCEAVLTVLEVRDSETAEDDISDVPGTQRLELRDDRAFSTPTGGSDTLVGTSLDTPPTSVTGTSEEQVSWWGSGQTVLEQEAGSGGGTRPLPGSPRQAQTTGAGPRHLGVEPLVRASRANLVGASWGSEDSLSVASDLYGSAFSLYRGRALSIHVSIPPSGLHREEPDLQPQPASDALRPRPALPPPSKSALLPPPSPRVGKRALPGPSTQPPATPTSPHRRAQEPSLPEDITTTEEKRGKKPKSSGPSLAGTVESRPQTPLSEASGRLSALGRSPRLVRAGSRILDKLQFFEERRRSLERSDSPPAPLRPWVPLRKARSLEQPKSEGGAAWGTPEASQEELRSPRGSVAERRRLFQQKAASLDERTRQRSATSDLELRFAQELGRIRRSTSREELVRSHESLRATLQRAPSPREPGEPPLFSRPSTPKTSRAVSPAATQPPPPSGAGKSGDEPGRPRSRGPVGRTEPGEGPQQEIKRRDQFPLTRSRAIQECRSPVPPYTADPPESRTKAPSGRKREPPAQAVRFLPWATPGVEDSVLPQTLEKNRAGPEAEKRLRRGPEEDGPWGPWDRRGTRSQGKGRRARPTSPELESSDDSYVSAGEEPLEAPVFEIPLQNMVVAPGADVLLKCIITANPPPQVSWKKDGSMLHSEGRLLIRAEGERHTLLLREAQAADAGSYTATATNELGQATCASSLAVRPGGSTSPFSSPITSDEEYLSPPEEFPEPGETWPRTPTMKLSPSQDHDSSDSSSKAPPTFKVSLMDQSVREGQDVIMSIRVQGEPKPVVSWLRNRQPVRPDQRRFAEEAEGGLCRLRILAAERGDAGFYTCKAVNEYGARQCEARLEVRAHPESRSLAVLAPLQDVDVGAGEMALFECLVAGPADVEVDWLCRGRLLQPALLKCKMHFDGRKCKLLLTSVHEDDSGVYTCKLSTAKDELTCSARLTVRPSLAPLFTRLLEDVEVLEGRAARLDCKISGTPPPSVTWTHFGHPVNEGDNLRLRQDGGLHSLHIARVGSEDEGLYEVSATNTHGQAHCSAQLYVEEPRTAASGPSSKLEKMPSIPEEPEHGDLERLSIPDFLRPLQDLEVGLAKEAMLECQVTGLPYPTISWFHNGHRIQSSDDRRMTQYRDIHRLVFPAVGPQHAGVYKSVIANKLGKAACYAHLYVTDVVPGPPDGAPEVVAVTGRMVTLSWNPPRSLDMAIDPDSLTYTVQHQVLGSDQWTALVTGLREPAWAATGLKKGIQHIFRVLSSSGKSSSKPSAPSEPVQLLEHGPPLEEAPAVLDKQDIVYVVEGQPACVTVTFNHVEAQVVWRSCRGALLEARTGVYELSQPDDDQYCLRICRVSRRDLGPLTCSARNRHGTKACSVTLELAEAPRFESIMEDVEVGPGETARFAVVVEGKPLPDIMWYKDEVLLAESNHVSFVYEENECSLVLLSAGSQDGGVYTCTARNLAGEVSCKAELSVLSAQTAMEVEGVGEDEEHRGRRLSDYYDIHQEIGRGAFSYLRRVVERSSGLEFAAKFIPSQAKPKASARREARLLARLQHGCVLYFHEAFERRRGLVIVTELCTEELLERMARKPTVCESETRTYMRQVLEGICYLHQSHVLHLDVKPENLLVWDGAGGEEQVRICDFGNAQELTPGEPQYCQYGTPEFVAPEIVNQSPVSGVTDIWPVGVVAFLCLTGISPFVGENDRTTLMNIRNYNVAFEETTFLSLSREARGFLIKVLVQDRLRPTAEETLEHPWFKTEAKGAEVSTDHLKLFLSRRRWQRSQISYKCHLVLRPIPELLRAPPERVWVAMPRRQPPSGGLSSSSDSEEEELEELPSVPRPLQPEFSGSRVSLTDIPTEDEALGTPEAGAATPMDWQEQERTPSKDQEAPSPEALPSPGQESPDGPSPRRPELRRGSSAESALPRVGSREPGRSLHKAASVELPQRRSPSPGATRLTRGGLGEGEYAQRLQALRQRLLRGGPEDGKVSGLRGPLLESLGGRARDPRMARAASSEAAPHHQPPPESRGLQKSSSFSQGEAEPRGRHRRAGAPLEIPVARLGARRLQESPSLSALSETQPPSPARPSVPKLSITKSPEPSAVTSRDSPQPPEPQPVPEKVPEPKPEPVRAAKPAQPPLALQMPTQPLTPYAQIMQSLQLSSPTLSPQDPAVPPSEPKPHAAVFARVASPPPGVSEKRVPSARTPPVLAEKARVPTVPPRPGSSLSGSIENLESEAVFEAKFKRSRESPLSRGLRLLSRSRSEERGPFRGAEDDGIYRPSPAGTPLELVRRPERSRSVQDLRVAGEPGLVRRLSLSLSQKLRRTPPGQRHPAWESRSGDGESSEGGSSARASPVLAVRRRLSSTLERLSSRLQRSGSSEDSGGASGRSTPLFGRLRRATSEGESLRRLGVPHNQLGSQTGATTPSAESLGSEASGTSGSSAPGESRSRHRWGLSRLRKDKGLSQPNLSSSVQEDLGHQYVPSESDFPPVFHIKLKDQVLLEGEAATLLCLPAACPAPRISWMKDKQSLRSEPSVVIVSCKDGRQLLSIPRAGKRHAGLYECSATNVLGSITSSCTVAVARIPGKLAPPEVPQTYHDTALVVWKPGDGRAPCTYTLERRVDGESVWHPVSSGIPDCYYNVTQLPVGVTVRFRVACSNRAGQGPFSNPSEKVFIRGTPDSPAQPAAAPRDAPVTSGPTRAPPPDSPTSLAPTPALAPPASQASTLSPSTSSMSANQALSSLKAVGPPPATPPRKHRGLLATQQAEPSPPSIVVTPSEPRSFVPDTGTLTPTSSPQGVKPAPSSTSLYMVTSFVSAPPAPQAPAPEPPPEPTKVTVRSLSPAKEVVSSPTPESTTLRQGPPQKPYTFLEEKARGRFGVVRSCRENATGRTFVAKIVPYAAEGKRRVLQEYEVLRTLHHERLMSLHEAYITPRYLVLIAESCGNRELLCGLSDRFRYSEDDVATYVVQLLQGLDYLHGHHVLHLDIKPDNLLLAADNALKIVDFGSAQPYNPQALKPLGHRTGTLEFMAPEMVKGDPIGSATDIWGAGVLTYIMLSGYSPFYEPDPQETEARIVGGRFDAFQLYPNTSQSATLFLRKVLSVHPWSRPSLQDCLAHPWLQDAYLMKLRRQTLTFTTNRLKEFLGEQRRRRAEAATRHKVLLRSYPGSP

SEQ ID NO: 162 - protein, 8523 aa, Mus musculus
  misc_feature (2028)..(2028): Xaa can be any naturally occurring amino acid
  misc_feature (2065)..(2065): Xaa can be any naturally occurring amino acid
  misc_feature (3656)..(3657): Xaa can be any naturally occurring amino acid
FSGAPRFLTRPKAFVVSVGKDATLSCQIVGNPTPHVSWEKDRQPVEAGARFRLAQDGDVYRLTILDLALGDSGQYVCRARNAIGEAFAAVGLRVDSEGTCAEQAPHFLLRPTSIRVREGADATFRCRVGGSPQPAVSWSKDGRRLGPPDAPHVRVEEHGESSALRIRSARPRDGGTYEVRAENPLGSASAAAALVVDSDAEVAGPPGTSTATLLAHLQQRREAMRAEGIPPSPPGAGTRTCTVTEGKHARLSCFVTGEPKPETVWKKDGQLVTEGRRHVVYEDEQENFVLKILFCKQSDRGLYTCTASNLVGQTYSSVLVVVREPTVPFKKRLQDLEVREKESATFQCEVAQPATEAAWFKEETRLWASAKYDIEEEGTERRLTVRNVSADDDAVYICETTEGSRTVAELSVQGRRNLTRKLPRKTAVRTGDTAIFWVELAVPEGPVRWLRNQEEMVAGGRVAITAEGTCHTLTIFQCTLEDMGEVAFVSGGCRTTTQFCVSAPRRPPLYPPADPVVKAKTESSVTLSWSAPPHGDRPVTIDGYVLEKRKLGAYAWSRCHEAGWLATTEFTITGVAEEGDFQFRVSAINHFGQGPYLEFPGTMHLVPMLAVKTPLKAVEAVEGGEVTFSVDLTVASSGEWFLDGEALKASSIYVIRCDRTRHMLTIREVPARLHGAQLKFVANGIETSIQMVVRAALGLPSSKLPAAAAREVLAQLHEEAQLLAELSDQAAAVTWLKDGRELSLGPKYEMQVSAGRRALLVRDVAQDDAGLYECVSRGSRTAYQLLVQEPKLMFAKEQQAHSEVKAEAGASATLSCEVAQAQTEVTWFKDGKKLSSSSKVRVEASGCSRRLVVQQAGKADAGEYSCEAGGQKLSFRLDVAEPKLVFAKEQQARSEVKAEAGNSATLSCEVAQAQTEVTWFKDGKKLSSSSKVRMEASGCSRRLVVQQAGKADAGEYSCEAGGQKLSFHLDVTEPKLVFAKEQQAHSEVKAEAGASATLSCEVAQAQTEVTWFKDGKKLSSSSKVRMEASGCSRRLVVQQAGKADAGEYSCEAEGQKLSFRLDVAEPKMVFAKEQQARSEVKAEAGASATLSCEVAQAQTEVTWFKDGKKLSSSSKVRMEASGCSRRLVVQQAGKADAGEYSCEAGGQKLSFRLDVTEPKLVFAKEQQARSEVKAEVGNSATLSCEVAQAQTEVTWFKDGKKLSSSSKVRMEASGCSRRLVVQQAGKADAGEYSCEAGGQKLSFRLDVAEPKLAFAKEQQAHSEVKAEAGASATLSCEVAQAQTEVTWFKDGKKLSSSSKVRVEASGCSRRLVVQQAGKADAGEYSCEAGGQKLSFRLDVAEPKLAFAKEQQAHSEVKAEAGASATLSCEVAQAQTEVTWFKDGKKLSSSSKVRVEASGCSRRLVVQQAGKADAGEYSCEAGGQKLFFRLDVAEPKLMFAKEQQAHSEVKAEAGASATLSCEVAQAQTEVTWFKDGKKLSSSSKVRVEASGCSRRLVVQQAGKADAGEYSCEAGGQKLSFRLDVAEPKLVFAKEQQAHSEVKAEAGASATLSCEVAQAQTEVTWFKDGKKLSSSSKVRVEASGCSRRLVVQQAGKADAGEYSCEAGGQKLSFRLDVAEPKLAFAKEQQAHSEVKAEAGASATLSCEVAQAQTEVTWFKDGKKLSSSSKVRVEASGCSRRLVVQQAGKADAGEYSCEAGGQKLSFRLDVAEPEAESQIPERPSRREPLVVKEHETIILTATIAAPSVAAVTWLKDGVEIRRSKRHEATSLGDTHTLTVRGAQVLDSAIYSCRVGKEGQDFPVQVEEVAAKFSKPLEPVEGELGGTVMLVCELSPEQAEVVWRCGNTQLRPGKRFQMTSEGPRRTLTVSGLREDDAEEYVCESRDDRTSARLTVKVPRVVKFTSGLSAMVAEEGQEATFQCVVSPSDAGVTWYKDGMQLQPSEKFVMVESGASRSLTILGLTLEDAGQVTVEAEGASSSAALRVREAPVLFKKKLEPQTVEERTSVTLEVELTRPWPEVKWTRNAAVLTPXENVEIRAEGARHCLVLRSVGFADRGFFGCETPDDKTXAPLTVRQVRLVRGLQEVEAKEQGTASMDVELSHAEVEGSWTRDGLRLQPGPKCHLAVQGPVHILTLSALQPQDSGLVAFRAEGVHTSARLIVTELPVSFTRVLQDVVATQKEKVTLECELSRPVDVRWLKDGVELRAGKAIGIVAQGTCRSLVIYRCETGDQGVYVCDALDAQTSASLRVQGRSVQITKPLEDVEVMEKEGATFSCEVSHDEVPGLWFRESSKLRPSDNVRIRQEGRTYTLIFRRVLAEDAGEVKFVAENAESRAHLRVKELPVTLLRPLRDKIAMEKHRGVLECQVSRASAQVRWFKGGVELQSGPKYEVVSDGLYRKLVINDVQPEDEDTYTCDAGNVKTSAQFFVEEQSITIVRGLKDMTVMEPAPAWFECETSIPSVRPPKWLLGKTVLQAGGNVGLEQDGTVHRLTLHKTCSTMTGPVHFTIGKSRSSAQLVVSDIPVVLTRPLEPKAGRELQSVVLSCDFRPAPKAVQWYKDDTPLSPSEKFKMALEGQMAELRILRLTPADAGVYRCQAGSAQSSAEVTVEAREVTVIQPLQDAEAMEEGRVCFSCELSHKDEDIEWSLNGTPLYNDSFHEISHEGCLHTLVLKSVRQADTGTVCATSPKVSVSARLVVKGKPVVFLKALDDVSAEERGTLTLQCEVSDPEARVVWRKDGVELGPSDKYDFLHKAGARGLTVHDLSHEDAGLYTCQVGSKETQSKVSVHDLHVGITKRLKTVEVLEGESCSFECVLSHESPSDPAVWTVGGKTVGGSGHFHAVRQGRKYTLTVKDAALSDAGEVVFSVLGLTSKASLIIRERPVDITKPLEDQRTTLGEDVMLSCELSRAGTSVRWLKDGKAIRKSQKYDLLSEGTRAVLVVRKASLKDSGEYTCETEASKSTAKLCVEEKANRFTEELADLQVEEKGRAVFTCKTEHPASVVTWRKGLLELRASGKHVPSQEGLTLKLTINALERTDSDTYTCDIGQARTQARLLVHGQKVRVIEDLEDTAVQEGSSAKFCCRIAPADYGPVHWFLDKTPLHSNELNEITVQPGGYHVLTLRQLALKDSGTVYFEAGDQRTSAALRVTEKPSIFSRPLTDVTVTEGEDLTLVCETTTVDSSVRWTKDGKTLRPSARCQLSHEGCQAQLLITATTPQDGGRYKCEIGGASSSSIVRVHALPVRFRESLKDVEVPEGKAATLRCVLSSVAAPVEWRHGDDVLKSSNKYSLRQEGAVLELVIRDLQPQDSGQYSCSFGDQTTSATLTVKTSSAQFVGKLRNKEATEGTTVTLRCELTKEAPVEWKKGTETLRNGDKYSLKQDGAVCELQICSLLVADAGEYSCVCGQEKTSATLTVKALLVHFVRRLRSKEATEGDTTTLQCELSKAAPVEWRKGTETLRDGDRYSLKQDGAVCELQIRSLTIADAGEYLCTCGQEKTSATLTVRALPAKFKDSLKNEEATEGTTATLSCELSKAAPVTWKKGPKTLQSGDKYVLRQDGAVCGLQIHGLTMADAGEYSCVCGQEKTSATLTVRGLPAKFIEDLRSQEATEGATAILRCELSKAAPVEWRKGSETLKDGDRYTLRQDGAVCELQIRGLAVVDTGTYXXCVCGQERTSATLNINALPTKFTEGLRNEEATEGTMATLRCQMSKAAPVEWRKGSETLRDGDRYSLRQDGAMCELQIRGLTIEDSGEYTCVCGQEKTSATLSVKALPSRFIEDLRSQEATEGTMATLRCQMSKTAPVEWKKGSETLRDGGRYSLRQDGPVCELQICDLAVEDAGEYSCVCGQEKTSATLSIKALPPRFIEDLRSQEATEGTMATLRCQMSKAAPVEWRKGSETLGDGGRYSLRQNGAVCELQIHDLAVEDTGEYSCVCGQEKTSATLNVKALPPRFIEDLRSQEATEGTMATLRCQMSKAAPVEWRKGSETLRDGGRYSLRQDGAVCELQIHDLDVEDAGQYSCVCGQEKTSAVLTVDALPPKFTEGLKKEEATEGTMVTLRCQMSKEATVEWRKGAKTLSDGGRYSLRQDGAMCELQICGLAVEDAGEYSCVCGQEKTSATLSVKALPPRFIEDLRSQEATEGTMATLRCQMSKAAPVEWRKGSETLRDGDRYSLRQDGAVCELQIRDLAVEDAGEYLCVCGQEKTSATLSVKALPPRFIEDLRSQEATEGTMATLRCQMSKAAPVEWRKGSKTLRDGDRYSLRQDGAMCELQICDLAVEDTGDYSCVCGQEKTSATLSVKALPPRFIEDLRSQEAREGTVATLRCRMSKAAPVEWRKGSETLKDGDRYSLRQEGNLCELQIRDLAVEDTEEYSCVCGQEKTSATLSVKALPAKFIEDLRSQEAPESSTVTLRCKLSKKASVVWKKGSETLRNGARYSLRQDGAVCELEIRDLTVEDTGEYSCTCGQERTSATLSIMAPQVVFQQPLQNLQAEEGSMASLRCELSVPNAAMVWSKGGLELQGDTRREARQQGCVAELLLRDLRREDAGEYSCTCGSQTTSATLMVTAAPVRFLRELQAQDVDEGATARLRCELSREAVSVEWRKGSLQLFPCAKYQMVQEGTTAELLVHGVEQEDAGEYTCDAGHTQSIARLSVRAPKPKFKTDLQSTEQEAGGTARLCCQLSEAEPGTPVQWLKEGVELHVGSKYEMRRQGAVCELLIHGLEAKDTGEYACLVGGQKTLASLRVKEPEVTIVRGLVDMEVQADEDVEFTCKVSQAGATDVQWHLQGLPLQSNEVTEVAVLADGCTHVLQLKGVTLEDAGTVSFHVGGLSSSAQLTVRVPEVTVLEPLKDVQLSEGQDAHFRCRLSRASGQEARWALGGVPLQCNEMNDITVEQGTLYLLTLHKVTLEDAGTITLQVGSCSSEAQLKVTAKNTVLRGLENVDALEGGEALFECQLSQPEVAAHTWLLDDEPVHTSEKVEVVYFENGLRHLLLLKNLKPQDSCRVTFLAGDVVTSAFLTVRGWRLEVLEPPHDASVKAGMQVRFTCILSEAVPVGEATWYINGAAIQPDDTDWTVTTDGSHHALTLSNAQPQHAGEVTFAARDAVASARLSVLALPDPPEDAEVVGRSDHSVTLSWVAPMSDGGGGLCGYRVEMKEASTGQWQLCHDLVPGPECVVDDLVPGKTYRFRVAAVGPAGAGEPVHLPQMVKIAPAPAPAPAPAPAPETRQAVVGEDICLELEVAADGGEVVWHKGTERIQPGGHFEVLSRGQRQMLVIKGFRTEDQGEYRCGPIQGLPSSGAATFNVVMTSGSGDEVPAQPSLPPEAAQEGDLHLLWEALARKRRMSREPTLDSISELPEEDSRVQHLRQEAEETAPDLSEGYSTADELARTGEADLSHTSSDDESRAGTPSLVTYLKKAGGPGISPLASKVTTSVKPQKQQEPVVPTCPPPGDLSAADLMDPSLDKAAVKIQAAFKGYKVRKEMKQQEGPVFSRTFGDTEAQVGDVLRLECVLATKTDMRACWLKDGIELTDGRHYHIDQLKDGTCSLLVTGLAPTDSGRYTCQVSTKSGRVSHSACVVVSGTESEAESSSGGELDDAFRRAARRLHRLFRTKSPAELSEEELFLSADEGPGEPEEPADWQTYREDENFVCIRFESLAEARQAVTCFRNMFATMGIGVEISLGEQGPRGVEMRIGKVAPTVTPAVPLAKTPGLQTSDAAPVFLTELQNQDVQDGYPMSFDCVVTGQPVPSVRWFKDGKLLEEDDHYMINEDQQGGHQLIITAVVPADMGVYRCLAENSMGVSSTKAELRVELTSTDYDTAADATETSSYFSAQGYLSSREQEGTESDEGQLPQVLEELKDLQVAPGTRLAKFQLKVKGYPAPKLYWFKDGQPLTTSDHIRMTDKKTLHTLEIVSVTREDSGQYAAYISNAVGAAYSSARLLVRGPSEPEEKPASDVHERLVPPRILEKFTPKKVKRGSSITFSVKVEGHPAPSVHWLKEEAEKGVLWIGPDTPGYTMASSSKQHSLVLLDVGRQHQGTYTCIATNPAGQALCSASLHISGLAKEEEQERVKEALISSFLQGTSQAVSAQMSESAGFADLVGQSKGESLVAEEAHSHLSLAEVGTEEFLQKLTSQITEMVSAKISQAKLQVPGGDSDEETKTPSASPRHGRSRPSSSVQESSSESEDGDSRGEIFDIYVVTADYLPLGAEQDAIILREGQYVEVLDSAHPLRWLVRTKPTKSSPSRQGWVSPAYLDKRLKLSPEWGPTEAPEFPGEAVSEDEYRTRLSSVIQELLSSEQAFVGELQFLESHHMKHLERSPRVPAAVASQKTVIFRNVQDISHFHSSFLKELQGCGTDDDVAMCFIKNQEAFEKYLEFLVGRVQAESVVVSTPVQEFYKKYAEETLSAKDPTQPPPPPLQHYLEQPVERVQKYQALLKELIRNKARNRQNCALLEQAYAVVSALPQRAENKLHVSLMENYPGTLEALGEPIRQGHFIVWEGAPGARMPWKGHNRHVFLFRNYLVICKPRRDSRTDTFSYVFRNMMKLSSIDLNDQVEGDDRAFEVWHEREDSVRKYLLQARTVIIKNSWVKEICGIQQRLAQPVWRPPEFEEELADCTAELGETVKLACRVTGTPKPIVSWYKDGKPVEVDPHHILIEDPDGSCTLILDNLTGIDSGQYMCFAASAAGNASTLGKILVQVPPRFVNKVRATPFVEGEDAQITCTVEGAPYPQIRWYKDGTLLAPGNRYRMLNEPRSGVLVLVIQAASKEDLGHYECELVNRLGSTRGGGELYMQSPALRARDQHHREQIVAAVEDTSVEGSAHSAQDGADQQAASVLWRLLGSEALGPSPGDLPNTRQSEPPAFEEAASQIPGAASGTPGELPEVSQPGTHKGLEQETTSSGSQGWTVPIRVEGTAWPGAGTGQLLLDVHSQVIMETTQRTYVCQAPDTGVTRAPSMQVTIEDVQVQVGDMAQFDAVIEGHPPPIVTWYKGSTQLTSSARLSQRQDGTTYSLVLTDVAPHDAGVYTCVANNAGGQVLCKAELLVHGGDKLDAENQVYRRKLHSFYDVQEEIGRGVFGFVKRVQHKGNKMFCAAKFIPLRSKTRAQAYQERDILATLGHPLVTGLLDQFETRKTLILILELCSSEELLDRLFKKGVVTEAEVKVYIQQLVEGLHYLHSHGILHLDIKPPNILMVHPAREDIKICDFGFAQKITPSEPQYSKYGSPEFVSPEIIEQNPVSEGSDIWAMGVISYLSLTCSSPFAGESDRATLLNVLEGRVSWSSPTAAHLSEDAKDFIKATLQRTPRARPSTSQCLAHPWFLKSMPAEEAHFINTKQLKFLLARSRWQRSLMSYKSILVMRSIPELLQGPPDSPSLGVARHLRGEASGASSSSSSSDNELAPFARAKSLPPSPVTHSPLLHPRGFLRPSASLPEETEASMPTADAAVPASPQSAGPPASPGCVPRHSVISSLFYQQAGEGAERGNKTSGAKRHPARRRHLLKGGYIARALPGLREPLMEYSLLEEEAAREEQASLMTKTPSFETALRLPSSSVREVPGRSHSLDNPPVTTGPSPEACKEQLLFPPSTGLTHETTAKDRGHKEGFLQESVPFPPMSGDSRPGKQEGSSQDSCRGKPASSCHSELGSGSQEGCGPPSSQSLGSLPPQSLKKELSTSCGPLFSEQPQAAPFPTQVSPLLGSEKEPQDGSLSEGPVPVPSSSPGSASQVDASLDTEGLSEAGDTCDFTPPPQRPQEQATTRKFSLESRGGYAGVAGYGTFAFGGDAGGMLGQGPLWARMAWAVSQSSEEQDEAATESPQPLESLGPIAEASGVPLRTSPSLTPWEEVEQVSLVQIRDLSGDAEAADTISLDISEVDPAYLNLSDLYDIKYLPFEFMIFRRVPKPIEQPESPGSETEAGQGLADFLEEAAWPWPGELGLRAGLEITEEPEEPGDLEALLGEAAVGRKRKWSPSRGLFQFPGRCLSGEEPVELGLRQRVKASMAHISRILKGRPEGPEREGPPRKKAGLASFRLSGLKGRDQAPSFLRELSDEAVVLGQSVTLACQVLAQPTAQATWSKDGVLLESSGHLLISSTLKNFQLLTILVVKEEDLGTYTCCVSNPLGTAVTTGVLRKAERPSSSPRPEVGELYKDAVLLVWKPVESCGPVTYIVQCCIEGGSWTTLASDISDCCYLTGKLSRGGMYIFRTACVSKAGMGPYSSPSEQVLLGGPNHLASEEESSRGRPAQLLPSTKTFAFQMQIRRGRFSVVRQCREKASGRALAAKIVPYQPEDKTAVLREYEALKRLHHPHLAQLHAAYLSPRHLVLILELCSGPELLPSLAERESYSESDVKDYLWQMLSATQYLHAQHILHLDLRSENMMVTEYNLLKVIDLGNAQSLDQEKVPAPENFKDYLETMAPELLEGQGAVPQTDIWAIGVTAFIMLSGEYPESSEGTRDLQKGLRKGLIRLSRCYAGLSGGAVAFLQSSLCAQPWGRPCASTCLQCGWLTEEGPTGSRPTPVTFPTVRLRAFVREREKRRALLYKKHNLAQVR

SEQ ID NO: 163 - protein, 372 aa, Mus musculus
MRSSSWRKSDQRVFIEQVRECMNNGYLLSSKKIGSGAFSKVYLAYATRERMKHNPRLSSDLRGKRHTMVAIKIVSMAEAPAEYSRKFLPREILSLNATYKHMNIVQLYETYQNSQRSYLVLELAARGDLLEHINAVSDLRCCPGLEEEEARRLFWQLVSAVAHCHNVGIVHRDLKCENILLDDQGFIKLTDFGFANWVGLKNSLLSTFCGSVAYTAPEILMSKKYNGEQADLWSLGIILHAMVSGKLPFKEHQPHRMLNLIRRGPIFRPGLSPECRDLIRGLLQLHPCERLDLQQVAAHCWMLPAEHMLSSALGAPREQDHSWSTVAPDNTEPDRDTRHARSKGSSSSSGRTSPRRPSLAQLCNTWKPAPEQ

SEQ ID NO: 164 - protein, 448 aa, Mus musculus
MDNKKKDKDKSDDRMARPSGRSGHSTRGTGSSSSGVLMVGPNFRVGKKIGCGNFGELRLGKNLYTNEYVAIKLEPMKSRAPQLHLEYRFYKQLGSGDGIPQVYYFGPCGKYNAMVLELLGPSLEDLFDLCDRTFSLKTVLMIAIQLISRMEYVHSKNLIYRDVKPENFLIGRPGNKAQQVIHIIDFGLAKEYIDPETKKHIPYREHKSLTGTARYMSINTHLGKEQSRRDDLEALGHMFMYFLRGSLPWQGLKADTLKERYQKIGDTKRATPIEVLCENFPEEMATYLRYVRRLDFFEKPDYDYLRKLFTDLFDRKGYMFDYEYDWIGKQLPTPVGAVQQDPALSSNREAHQHRDKIQQSKNQSADHRAAWDSQQANPHHLRAHLAADRHGGSVQVVSSTNGELNTDDPTAGRSNAPITAPTEVEVMDETKCCCFFKRRKRKTIQRHK

SEQ ID NO: 165 - protein, 1243 aa, Mus musculus
MSGGGEQPDILSVGILVKERWKVLRKIGGGGFGEIYDALDMLTRENVALKVESAQQPKQVLKMEVAVLKKLQGKDHVCRFIGCGRNDRFNYVVMQLQGRSLADLRRSQSRGTFTISTTLRLGKQILESIESIHSVGFLHRDIKPSNFAMGRFPSTCRKCFMLDFGLARQFTNSCGDVRPPRAVAGFRGTVRYASINAHRNREMGRHDDLWSLFYMLVEFVVGQLPWRKIKDKEQVGSIKERYDHRLMLKHLPPEFSTFLDHISSLDYFTKPDYQLLTSVFDNSIKTFGVIESDPFDWEKSGTDGSLTTTTTSATPQLHTRLTPAAIGIANATPIPGDLLRENTDEVFPDEQLSDGENGIPVGVSPDKLPGSLGHPRPQEKDVWEEMDINKNKIKLGICKAATEEENSHGQVNGILNAPSLGSPIRVRSEITQPDRDVPLVRKLRSIHSFELEKRLTLEPKPDTDKFLETCMEKMQKDSSAGKEPVPPALPHKPCVPVVTHTDHIWHYDDEYLPDASKPASANTPEQADGGGSNGFIAVNLSSCKQEVDSKEWVIVDKEQDLQDFRTNEVLGHKTTGSPSDEEPEVLQVLEGSPQDEKIQVGPWTDNHHLKKESSGVVLALSAECPATAASELYTDRLDLQAGAASQFITVTPTSPMEAQAEGPLTAITIPRPSVASTQSTSGSFHYGPQPEKKDLQPLEPTVELYSPRENFSGLVVTEGELASGGSRVDLGLQIDHTGHDMLPNMRDGDTSQDLGPKDPPDHNRLAVKEFEHLPGETEERSLLLGSENEDERLSKGQHCIEVSSPGELVTAERAQLAATEPLHVSETQNCSVLPNQDKTHEIMKLLAVGTSEISPQAIDPHAEGQIGQMAAMQKNKLFKDDGIQSESLPRQQGDLSAFLHQEGKREKVVPRNGELYHCVSENEHGPPTRKDMLRSSFVTRHSRIPVLAQEIDSTFESSSAISAKEKLLQKKAYQPEIVKLLVEKRQFKSFLGDLSSASDKLIEEKLAAVPVPFSEEEVFAPFSRLAADSHLSRSVEDSFLSPIISQARKSKIPRPVSWVSTDQINGSASPQFLPRPPPGKPPVRPGVEARLRRYKVLGSSNSDSDLFSRLAQILQNGSQKSRSTTQCKSPGSPHNPKTPPKSPVVPRRSPSASPRSSSLPRTSSSSPSRAGRPHHDQRSSSPHLGRSKSPPSHSGSSSSRRSCQQEHCKPSKNGPKGSGSLHHHSTSSKTPPGKSKPASKLSR

SEQ ID NO: 166 - protein, 1308 aa, Mus musculus
MQCLAAALKDETNMSGGGEQADILPANYVVKDRWKVLKKIGGGGFGEIYEAMDLLTRENVALKVESAQQPKQVLKMEVAVLKKLQGKDHVCRFIGCGRNEKFNYVVMQLQGRNLADLRRSQPRGTFTLSTTLRLGKQILESIEAIHSVGFLHRDIKPSNFAMGRLPSTYRKCYMLDFGLARQYTNTTGDVRPPRNVAGFRGTVRYASVNAHKNREMGRHDDLWSLFYMLVEFAVGQLPWRKIKDKEQVGMIKEKYEHRMLLKHMPSEFHLFLDHIASLDYFTKPDYQLIMSVFENSMKERGIAENEAFDWEKAGTDALLSTSTSTPPQQNTRQTAAMFGVVNVTPVPGDLLRENTEDVLQGEHLSDQENAPPILPGRPPEGLGPGPHLVPHPGGPEAEVWEETDVNRNKLRINIGKTPCVEEEQSRGVGVPSSPVRAPPDSPTTPVRSLCYRRVNSPESERLSTAADGRVELQERRSRMDLPGSPSRQACSSQPAQMLSVDTGHADRQASGRMDVSASVEQEALSNAFRSVPLAEEEDFDSKEWVIIDKETELKDFPPGAEPSTSGTTDEEPEELRPLPEEGEERRRLGTEPTVRPRGRGMHTLTEEDPRQMLPQPAPPQLSQADGRSETSQPPTPGSPSHSPLHSGPRPRRRESDPTGPQRQVFSVAPPFEVNGFPRAVPLALPYQDFKRDLSDYRERARLLNRVRRVGFSHMLLTAPQVPLAPFQPQANGKEGEEEEEEEEEEEEEEEEEEEEEEEEEEEEEEEEEAGALGEVLGPRSGSSSEGSERSTERSQEGAPSTLLADDQKEARGRASMADGDLEPEEGSKTLVLVSPGDMKKSPVTAELAPDPDLGTLAALTPQHERPQPTGSQLDVSEPGTLSSILKSEPKPSGPGAGGGVGLVAPGAGVTAVTSPFTKVERTFVHIAEKSHLNVMSSGGQASRPEELSTGGELGLEVLSEGGIAEEGAPAPLENGMALAGLDGTEMESCALSGPPGETPSEVVTDSLPNGPALADGPAPASQQEPVTKKGTTISPSRHAMPGSRPRSRIPVLLSEEDTGSEPSGSLSAKERWSKRARPQQDLARLVMEKRQGRLLLRLASGASSSSSEEQRRASETLSGTGSEEDTPASEPTTALPRKAVRAATTRSRIPRPISVSMPVEGQQLPGRPHGAASATDLAITSRLQLQKPSGLAPAADLRPKQSASRGPGPGRAQVSKPAAPRSPGLPASTARHPSGSPRSQSLSRKESSSPSHQARPGVPPSRGVLQVRSQPEASPVAPKKGPKGKQLQTQRAATKGRAVVSEGRPGAR

SEQ ID NO: 167 - protein, 1511 aa, Mus musculus
MPSSSDTALGGGGGLSWAEKKLEERRKRRRFLSPQQPPLLLPLLQPQLLQPPPPPPPLLFLAAPGAAAAAAAAAAASSSCFSPGPPLEVKRLARGKRRPGGRQKRRRGPRAGQEAEKRRVFWLPQPQQDGGGGASNGGGVTPLVEYEDVSSQSEQGLLLGGASAATAATAAGGTGGNGGSPASSSGTQRRAEGSERRPRRDRRSSSGRSKERHREHRRRDGTRSGSEASKARSRHGHSGEERAEAAKSGSSSSSGGRRKSASATSSSSSSRKDRDLKAHRSRTKSSKEPPSAYKEPPKAYREDKSEPKAYRRRQRSLSPLGGRDESPVSHRASQSLRSRKSPSPAGGGSSPYSRRLPRSPSPYSRRRSPSYSRHSSYERGGDVSPSPYSSSSWRRSRSPYSPVLRRSAKSRSRSPYSSRHSRSRSRHRLSRSRSRHSSISPSTLTLKSSLAAELNKNKKARAAEAARAAEAAKAAEAAKAAEAAAKAAKASNASTPTKGNTETGASVSQTNHVKEVKKLKTEHAPSPSSGGTVKSDKAKTKPPLQVTKVDNNLTVEKATKKTVVGKESKPAATKEEPVSTKEKSKPLTPSTGAKEKEQHVALVTSTLPPLPLPPMLPEDKDADSLRGNISVKAVKKEVEKKLRCLLADLPLPPELPGGDDLSKSPEEKKTAAQLHSKRRPKICGPRYGEIKEKDIDWGKRCVDKFDIIGIIGEGTYGQVYKARDKDTGEMVALKKVRLDNEKEGFPITAIREIKILRQLTHQSIINMKEIVTDKEDALDFKKDKGAFYLVFEYMDHDLMGLLESGLVHFNENHIKSFMRQLMEGLDYCHKKNFLHRDIKCSNILLNNRGQIKLADFGLARLYSSEESRPYTNKVITLWYRPPELLLGEERYTPAIDVWSCGCILGELFTKKPIFQANQELAQLELISRICGSPCPAVWPDVIKLPYFNTMKPKKQYRRKLREEFVFIPAAALDLFDYMLALDPSKRCTAEQALQCEFLRDVEPSKMPPPDLPLWQDCHELWSKKRRRQKQMGMTDDLSTIKAPRKDLSLGLDDSRTNTPQGVLPPAQLKSQSNSNVAPVITGPGQPLNHSELAILLNLLQSKSSVNMADFVQVLNIKVNSETQQQLNKINLPAGILATGEKQTDPSTPQQESSKSLGGVQPSQTIQPKVETDAAQAAVQSAFAVLLTQLIKAQQSKQKDAMLEERENGSGHEAPLQLRPPLEPSTPGSGQDDLIQHQDRRILELTPEPDRPRILPPDQRPPEPPEPPPVTEEDLDYRTENQHVPTTSSSLTDPHAGVKAALLQLLAQHQPQDDPKREGGIDYPTGDTYVPSSDYKDNFGSSFSAAPYVSSDGLGSSSAAAPLEARSFIGNSDIQSLDNYSTASSHTGGPPQTSAFTESFASSVAGYGDIYLNAGPMLFSGDKDHRFEYSHGPITVLTNSNDPSTGPESTHPLPAKMHNYNYGGNLQENPGGPSLMHGQTWTSPAQGPGYSQGYRGHISTSAGRGRGRGLPY

SEQ ID NO: 168 - protein, 433 aa, Mus musculus
MGQELCAKRLQPGCSCYHRSEGGEAHSCQRSQPGSTEPAVFELTEASSSTASFHPRGLEAASAQKLKSKRPRSNSDSFQEENLRQGLPWKKSLPFGAASSYLNLEKLGEGSYAKVYKGISRINGQLVALKVISMNAEEGVPFTAIREASLLKGLKHANIVLLHDIVHTKETLTFVFEYMHTDLAQYMSQHPGGLHPHNVRLFMFQLLRGLAYIHHQRVLHRDLKPQNLLLSHLGELKLADFGLARAKSIPSQTYSSEVVTLWYRPPDALLGATEYSSELDIWGAGCIFIEMFQGQPLFPGVSNILEQLEKIWEVLGVPTEDTWPGVSKLPNYNPEWFPPPKPQSLQIVWDRLGGVPEAEDLASQMLKGFPRDRVSAQEALVHDYFSVLPSQLYQLPDEESLFAVSGVKLKPEMCDLSASYRKRHHLVGVNKCW

SEQ ID NO: 169 - protein, 904 aa, Mus musculus
MKIPNIGNVMNKFEILGVVGEGAYGVVLKCRHKETHEIVAIKKFKDSEENEEVKETTLRELKMLRTLKQENIVELKEAFRRRGKLYLVFEYVEKNMLELLEEMPNGVPPEKVKSYIYQLIKAIHWCHKNDIVHRDIKPENLLISHNDVLKLCDFGFARNLSEGNNANYTEYVATRWYRSPELLLGAPYGKSVDMWSVGCILGELSDGQPLFPGESEIDQLFTIQKVLGPLPSEQMKLFYSNPRFHGLRFPAVNHPQSLERRYLGILNSVLLDLMKNLLKLDPADRYLTEQCLNHPTFQTQRLLDRSPSRSTKRKPYHVESSTLSNRNQSTKGAALQTHHRSNSKDIQNLSVGLPRAEEGLPANESFLNGNLAGATLSPMHTKTYQASTQPGSSSKDLTNNNIPHLLSPKEAKSKTEFDFNIDTKPSEGPGTKYLKSSTRSQQNRHSFMESSQSKAGTLQPSEKQSRHSYIDTIPQSSRSPSYRTKAKSHGALSDSKSVSNLSEARAQITETNTSRYFPSSCLDLNSPTSPTPTRHTDTRTLLSPSGRNNRNEGTLDSRRTTTRHSKTMEELKLPEHMDSSHSHSLSAPHESFSYGLGYTSPFSSQQRPHRHSMYVTRDKVRAKGLDGSLSIGQGMAARANSLQLLSPQPGEQLPPEMTVARPSVKESSREGASSFHTRQKSEGGVYHDPHSDDGTAPKENRHLYNDPVPRRVGSFYRVPSPRPDNSFHENNVSTRVSSLPSDSSSGTNHSKRQPGFDPWKSPENISHADQLKEKEKQGFFRSMKKKKKKTQTVPNTDGPDLLTLQKAIHSSSTASSRPKEWRPEKLSDLQTQSQPLKSLRKLLHLSSSTNHPASSDPRFQPLTAQQAKNSFSEIRIHPLSQATGGSSNIRQEPTPKGRPALQLP

SEQ ID NO: 170 - protein, 342 aa, Mus musculus
MEKYEKLAKIGEGSYGVVFKCRNKSSGQVVAIKKFVESEDDRVVRKIALREIRMLKQLKHPNLVNLIEVFRRKRKMHLVFEYCDHTLLNELERNPNGVSDGVIKSVLWQTLQALNFCHKHNCIHRDVKPENILITKQGMIKICDFGFARILIPGDAYTDYVATRWYRAPELLVGDTKYGSSVDVWAVGCVFAELLTGQPLWPGKSDVDQLYLIIRTLGKLIPRHQSIFRSNQFFRGISIPEPEDMETLEEKFSNVQPVALSFMKGCLKMNPDERLTCAQLLDSAYFESFQEDQMKRKARSEGRSRRRQQNQLLPLIPGSHISPTPDGRKQVVQLKFDHLPNI

SEQ ID NO: 171 - protein, 592 aa, Mus musculus
SNTAFPFVDTKGKRNTVNFPQIGNKVPSKGPMQYQRWVYWVNSMTYDPQENQSFIITYFPGQENQIHNQVLSSELKTSEIPFNINTKAQDTKPHPELQKKHKVPLTVAEALKFFKNQLSPYEQSEILGYSELWFLGLEAKKLNVVPEKFSKTSFDDEHGSYMKVLHDHIAYRYEVLEMIGKGSFGQVAKCLDHKNNELVALKIIRNKKRFHHQALVELKILEALRRKDKDNNHNVVHMKDFFYFRNHLCITFELLGINLYELMKNNSFHGFNLSIVRRFTFSILKCLHMLYVEKIIHCDLKPENIVLYQRGQVTVKVIDFGSSCYEHQKVYTYIQSRFYRSPEVILGHPYNMAIDMWSLGCIMAELYTGYPLFPGENEVEQLACIMEVLGLPPAHFTQTASRRQVFFECCFSEDSKGLPKNINNNRGGKRYPDSKDLTMVVKTYDSSFLDFLRRCLVWEPSLRMTPEQALKHAWIHEPRKFKPRPKPQILRKPGASISSEISTEKAEEQQASKGKKDEATKETTDKLKDEAEKHLENSGKQQSSVEHTADTIQLPHLTEASGKSETVAGSEMSAEQQSTSSPKSTNILPPIV

SEQ ID NO: 172 - protein, 541 aa, Mus musculus
MATIQSETDCYDIIEVLGKGTFGEVAKGWRRSTGEMVAIKILKNDAYRSRIIKNELKLLRCVRGLDPDEAHVIRFLEFFHDALKFYLVFELLEQNLFEFQKENNFAPLPARHIRTVTLQVLRALARLKELAIIHADLKPENIMLVDQTRCPFRVKVIDFGSASIFSEVRYVKEPYIQSRFYRAPEILLGLPFCEKVDVWSLGCVMAELHLGWPLYPGNNEYDQVRYICETQGLPKPHLLHAARKAHHFFKRMLTWESHERISPSAALRHPFVSMQQLRSAHEATRYYQLSLRGCRLSLQVDGKPPPPVIASAEDGPPYYRLAEEEETAGLGGVTGSGSFFREDKAPGMQRAIDQLDDLSLQEARRGLWSDTRADMVSDMLVPLKVASTSHRVPDSGPEPILAFYGSRLTGRHKARKAPAGSKSDSNFSNLIRLSQASPEDAGPCRGSGWEEGEGRTTSTEPSVIPQREGDGPGIKDRPMDAERPGPELFDPSSCPGEWLSEPEWTLEGIRGSRAQGLPAHHPHPHGPPRTTSFLQHVGGHH

SEQ ID NO: 173 - protein, 583 aa, Mus musculus
MAEKGDCIASVYGYDLGGRFIDFQPLGFGVNGLVLSATDSRACRKVAVKKIVLSDARSMKHALREIKIIRRLDHDNIVKVYEVLGPKGSDLQGELFKFSVAYIVQEYMETDLACLLEQGTLTEDHAKLFMYQLLRGLKYIHSANVLHRDLKPANIFISTEDLVLKIGDFGLARIVDQHYSHKGYLSEGLVTKWYRSPRLLLSPNNYTKAIDMWAAGCILAEMLTGKMLFAGAHELEQMQLILDTIPVVREEDKEELLRVMPSFVSSTWEVKRPLRKLLPDVNSEAIDFLEKILTFNPMDRLTAEMGLQHPYMSPYSCPEDEPTSQHPFRIEDEIDDIVLMAASQSQLSNWDRYPVSLSSDLEWRPDRCQDASEVQRDPRAGSTPLAEDVQVDPRKDSQSSSERFLEQSHSSMERAFEADYGRSCDYKVGSPSYLDKLLWRDNKPHHYSEPKLILDLSHWKQAASAPPRAAVAADPVSREDEPASLFLEIAQWVKSTQSGSERASPPPDAPEPRLSASPPGHPTPIDGGASPQFDLDVFISRALKLCTKPEDLPENKLGDLNGACISEHPGDLVQTEAFSKERW

SEQ ID NO: 174 - protein, 958 aa, Mus musculus
MKKFFDSRREQGSSGLGSGSSGGGGSSSGLGSGYIGRVFGIGRQQVTVDEVLAEGGFALVFLVRTSNGVKCALKRMFVNNEHDLQVCKREIQIMRDLSGHKNIVGYIDSSINNVSSGDVWEVLILMDFCRGGQVVNLMNQRLQTGFTENEVLQIFCDTCEAVARLHQCKTPIIHRDLKVENILLHDRGHYVLCDFGSATNKFQNPQAEGVNAVEDEIKKYTTLSYRAPEMVNLYSGKIITTKADIWALGCLLYKLCYFTLPFGESQVAICDGSFTIPDNSRYSQDMHCLIRYMLEPDPDKRPDIYQVSYFSFKLLKKECPVPNVQNSPIPAKLPEPVKASEAAVKKTQPKARLTDPIPTTETSIAPRQRPKAGQTQPNPGILPIQPALTPRKRATVQPLPQAAGPSNQPGLLPSVSQPKAQATPSQPLQSSQPKQPQAPPTPQQTPATQTQGLPTQAQATPQHQQQHLLKQQQQQQQQPQQPTAPPQPAGTFYQQQQQQQQQQAQTQQFQAVHPAAQQPVTAQFPVGSQGGAQQQLMQNFYHQQQQQQQQQQQLMAQQAALQQKTAVVVPQSQAQPATAPQAAAAQEPGIQAPVRQQPKVQTTPPPTIQGQKVGSLTPPSSPKTQRAGHRRILSDVTHSAVFGVPASKSTQLLQAAAAEASLNKSKSATTTPSGSPRTSQQNVSNASEGSTWNPFDDDNFSKLTAEELLNKDFAKLGEGKLPEKLGGSAESLIPGFQPTQGDAFTTPSFSAGTAEKRKGGQAVDSGIPLLSVSDPFIPLQVPDAPEKLIEGLKSPDTSLLLPDLLPMTDPFGSTSDAVIDKADVAVESLIPGLEPPVAQRLPSQTESVTSNRTDSLTGEDSLLDCSLLSNPTAGLLEEFAPIALSAPTHKAAEDSNLISGFGVAEGSEKVAEDEFDPIPVLITKNTQGGHSRNSSGSSESSLPNLARSLLLVDQLIDL

SEQ ID NO: 175 - protein, 1275 aa, Mus musculus
MEKYVRLQKIGEGSFGKAVLVKSTEDGRHYVIKEINISRMSDKERQESRREVAVLANMKHPNIVQYKESFEENGSLYIVMDYCEGGDLFKRINAQKGALFQEDQILDWFVQICLALKHVHDRKILHRDIKSQNIFLTKDGTVQLGDFGIARVLNSTVELARTCIGTPYYLSPEICENKPYNNKSDIWALGCVLYELCTLKHAFEAGNMKNLVLKIISGSFPPVSPHYSYDLRSLLSQLFKRNPRDRPSVNSILEKGFIAKRIEKFLSPQLIAEEFCLKTLSKFGPQPLPGKRPASGQGVSSFVPAQKITKPAAKYGVPLTYKKYGDKKLLEKKPPPKHKQAHQIPVKKMNSGEERKKMSEEAAKKRRLEFIEKEKKQKDQIRFLKAEQMKRQEKQRLERINRAREQGWRNVLRAGGSGEVKASFFGIGGAVSPSPCSPRGQYEHYHAIFDQMQRLRAEDNEARWKGGIYGRWLPERGVPPGVRPGFPSEASGHYHSPDAGAIRKTLKRLKAVSKQASTNRQKGHLAVERANQVEEFLQRKREAMQNKARAEGHGLLQNLASLYGGRPSSSRGGKPRNNEEEVVYLARLRQIRLQNFNERQQIKAKLRGENKEADGTKGQEATEETDMRLKKMESLKAQTNARAAVLKEQLERKRKEAYEREKKVWEEHLVARVKSSDVPLPLELLETGGSPSKQQVKPVISVTSALKEVGLDGSLTDTQEEEMEKSNSAISSKREILRRLNENLKAQEDEKEKQHHSGSCETVGHKDEREYETENAISSDRKKWEMGGQLVIPLDAVTLDTSFSATEKHTVGEVIKLDSNGSPRKVWGKNPTDSVLKILGEAELQLQTELLENTSFKSEVYAEEENYKPLLTEEENLQCISKEINPSATVDSTETKSPKFTEVSPQMSEGNVEEPDDLETEVLQEPSSTHTDGSLPPVLNDVWTREKEAAKETELEDKVAVQQSEVCEDRIPGNVDQSCKDQRDPAVDDSPQSGCDVEKSVQPESIFQKVVHSKDLNLVQAVHCSPEEPIPIRSHSDSPPKTKSKNSLLIGLSTGLFDANNPKMLRTCSLPDLSKLFRTLMDVPTVGDVHQDSLEIDELEDEPIKEGPSDSEDTVFEETDTDLQELQASMEQLLREQPGDEYSEEEESVLKSSDVEQTARGTDAPDEEDNPSSESALNEEWHSDNSDAETTSECEYDSVFNHLEELRLHLEQEMGFEKFFEVYEKVKAIHEDEDENIEICSTIVENILGNEHQHLYAKILHLVMADGAYQEDNDE

SEQ ID NO: 176 - protein, 778 aa, Mus musculus
  misc_feature (268)..(397): Xaa can be any naturally occurring amino acid
  misc_feature (518)..(547): Xaa can be any naturally occurring amino acid
MDNFHLIKIIGEGTFGKVYLAKDKSESSHCVIKEISLTKEKEASKNEVILLARMEHPNIVTFFSSFQENGRLFIVMEYCDGGDLMQRIQRQRGVMFSEDQILCWFVQISLGLKHIHDRKILHRDIKSQNIFLSKNGMVAKLGDFGTARTLNDSMELAQTCAGTPYYLSPEICQNRPYNNKTDIWSLGCVLYELCTLKHPFESNNFHHLVLKICQGRVAPISPHFSRDLQSLIPQLFRVSPQDRPSVTSLLKRPFLETLIARSLYPEVXXXXXXXXXXXXXXXXXXXXXXXXXXXXXXXXXXXXXXXXXXXXXXXXXXXXXXXXXXXXXXXXXXXXXXXXXXXXXXXXXXXXXXXXXXXXXXXXXXXXXXXXXXXXXXXXXXXXXXXXXXXXXXXXXXSPWSAAYLQRKFEAQQYKLKVERQLGLRPSSVEPHPNEGEKLQSHWEETKFQELQYRKNKMKDQEYWKQLEEIRQQYHNDMKEIKKKMGRELKESANLSHRTYLVKRSNLSSRPDAPEEEXXXXXXXXXXXXXXXXXXXXXXXXXXXXXXKRVVKFEISLDKCISEEDTVQENEAVDKLNATLSFEDGTKFQEHRCKEEHEDYTDRAFEELCGPEAEGFFQDVIAAENRRQWDAGAPHTLLRIMAMADVTSTCPTMPDDGQVIVMEGSVENGKQWWLDVPGTPCALAAECACSGSLSASKGETVMIKPQLPKEDQEKVEIATGIMVDDEQLEPGSDEDDMQEGRGIKNSMPSSATSKIKASPGCMASCPNSVTPPPLQRKI

SEQ ID NO: 177 - protein, 1111 aa, Mus musculus
MPDQDTKAKSTEKTADKQQGTTTRDYSDLKRLRCLLNVQSSKQQLPAINFDSAQNNMTKSEPTIRTGGHRARGQWHESTEAVELENFSINYKNERNFSKHPQHQLFQEIFTALVRNRLICREWVNRAPSIHFLRVLICLRLLMRDPCYQEILHKLGGIEDLAQYMEIVANEYLGYAEEQHCVDKLVNMTYIFQKLAAVKDQREWVTASGAHKTLVSLLGARDTTVLLGALLALASLAESSECREKISELNVVENLLMILHEYDLLSKRLTAELLRLLCAEPQIKEQVKLYEGIPILLSLLHSDHLKLLWSVIWILVQVCEDPETSVEIRIWGGIKQLLHILQGDRNFVSDRSSIGSLSSANAAGRIQQLHLSEDLSPGEIEENTVSLQAACCAALTELALNDTNAHQVVQENGVYTIAKLILPNKQSNAAQTNLLQCYAFRTLRFLFSMERNRPLFKRLFPTDLFETFIDIGHYVRDIGAYKDLVSQLNLLLEDELKQIAENIESINQKKAPLKYIGDYAVLDHLGSGAFGCVYKVRKRSGQNLLAMKEVNLHNPAFGKDKKDRDSSVKNIVSELTIIKEQLYHPNVVRYYKTFLENDRLYIVMELIEGAPLGEHFNSLKEKHHHFSEERLWKIFIQLCLALRYLHKEKRIVHRDLTPNNIMLGDKDKVTVTDFGLAKQKQESSKLTSMVGTILYSCPEVLKSEPYGEKADVWAAGCILYQMATLSPPFCSTNMLSLATKIVEAVYEPVPEGIYSEKVTDTIRRCLTPDAEARPDIVEVSSMISDVMMKYLDRLSTSQLALERKLERERRRTQRYFMEANRNAVTCHHELALLSQETFEKASLSSSSSGAASLKSELSESAELPGEGCHIPCGKEEDRVCEEVLSEDNFQLESVEKDLYSELDDELDVSDNCSSSSSSPLKESTFSILKRSFSASGRERHSQARDFIAGLGSRPRPGPQMSTFVVESASAGIAVSQRKVRQICDPIQQILIQLHKVIYITQLPPALHHDLKRRVIERFKKSLFSQQSNPCNLKSEIKKLSQGSPEPIELNFLTSDYHSLRHSRAANNWSPSDPTGSPSSFEVEEGVTYEQMQTVIEEVLEESGYYNFTTKR

SEQ ID NO: 178 - protein, 362 aa, Mus musculus
MPGKQSEDKPMEVSTVEDGGDEGLGGLTVEELQQGQEAALALEDMMALSAQTLVQTEVEELYEEVRPLGQGRFGRVLLVTHRQKGTPLALKQLPKQSTSLRGFLYEFCVGLSLGTHSAIVTAYGIGIESANSYSFLTEPVLHGDLITFIQPKVGLPQPAAQRCAAQLASALEHIHSHGLVYRDLKPENVLVCDPACQRVKLTDFGHTRPRGTLLRLTGPPIPYTAPELCAPPPLPEGLPIQPSLDAWALGVLIFCLLTGYFPWDQPLVEVDPFFEDFLIWQASGQPQDRPQPWYSLSPAADTLLWGLLDPHPRKRNPVGSIKSYLGQPWKQREGEAEELATELREDGWRGGQEAAKGEQPAC

SEQ ID NO: 179 - protein, 207 aa, Mus musculus
VNKDQITWEREDTAMALQRLVELTASRVTSVRSLCVQYRLIRKLGSGSYGRVLLAQPRQGGQTVALKLLRRDSVLRTTFLREFCVGRCVSSHPGLLQTLGRPLQTPRYFAFAQEFAPCGDLSGMLQEKGLPELMVKRIVAQLAGALDFLHGRGLVHADVKPDNVLVFDPDCNRVALGDLGLTRPEGSPTPATQCLCPLHHLNSASCC

SEQ ID NO: 180 - protein, 1373 aa, Mus musculus
MSACSDFVEHIWKPGSCKNCFCLRSDHQPTAGHPKARANSLPAGTRLPARPENCRLDDEGVNGLAYSKPTIAVKPTMMTSETSDLWTEASLSAEVPKVNWRRTPGKLLLPKQEDEPIVYLGSFRGLQKPASPLACTDGNSRCPPAYTMVGLHNLEARVDRNTAFQPVSFQEEKAGREELPSAHESFRQKLAAFAGMTSSCPKGPRPCTSPQPLRESLPSEDDSDQRCSPSGDSEGGEYCSILDCCPESKDAVHSTEGSGRRGGDCSPTCREQGPRTRPTEEEKQGLSFPRECCGQGSTANPPRLGPKKPSLNSEAASSSDGLSCGSSRSGASSPFAPHLENDYCSLVKEPASGKQQDLSGHFLTSGKCVGQAAELQPASLLRDPVQPEPIYAESAKRKKAAPGPPRPEPKKEQVPAGHSQGQVWTGDTWIQKTPPSWSQDREGANPAPQVATTITVIAAHPEEDHRTIYLSSPDSAVGVQWPRGPSNQDLQAGEEEPLVAQGLTSRESHPHNVTENTAKEKPAIPPKLSKSSPGGSPVSPAPPLTDHSDGNTGGSSVGPQLLSRVPANLTSSCHTNGVATAGDSAKCPPPATSSSVLDQRRPRYQTGAWSRQCRIEEEEEVGQELSQSWGRELENGTADHSNSSTWHRLHPIDGTSGQNSKTNSGMSKSASFAFEFPKDRGRLEAFSPPPPPPKSRHLLKMNKSSSDLEKVSQSSAESLSPSFRGAHVSFTTGSTDSLASDSRPCSDGGPSYEPTHSPTISGKKLFAPVPFPSGSTEDVSPGGGPAQPPPLPQKKIVSRAASSPDGFFWTQGSPKPRTASPKLNLSHSETNVCAHDEPPFNCSLNSGNRSHHVFSSSEPLGKAFKGNAPWAPALGLANSKGGCGSPSLQCRAATSTSSSQLSVSSQASSSSTQLQLHSLLSSISSKEGTYAKLGGLYTQSLARLVTKCEDLFMGGQKKELRFNENYWSLFKLTCNKPCCDSGDAIYYCATCSEDPGSIYAVKICKTPEPKSASYCSPSVPVHFNIQQDCGHFVASVPSSMLASPDTSSKDTAPAVSPQPPAQEQDCVVVITREVPHQTASDFVRDSMASHRAEPEVYERRVCFLLLQLCNGLEHLKEHGIIHRDLCLENLLLAHCNPQSSPGPSATPTVPTTTSRCPSAAPAATTACQGGPGEKQLPRLIISNFLKAKQKPGGTTNLQQKKSQARLAPEIVSASQYRKFDEFQTGILIYELLHQPNPFEVRAQLRERDYRREDLPPLPTLSLYSPGLQQLAHLLLEADPIKRIRIGEAKRVLQCLLWGPRRELVEQPCTSEEVLCNTLHNWIDMKRALMMMKFAEKAVDRRRGVELEDWLCCQYLASAEPGALLQSLKLLQLL

SEQ ID NO: 181 - protein, 1735 aa, Mus musculus
MSACNTFTEHVWKPGECKNCFKPKSLHQLPPDSEKTPITHGSGKTNANHSNNHRVRSTGNFRPPVAKKPTIAVKPTMMVADGQSVCGELSIQEHCENKPVILGWNQNKTSLSQKPLNNNSEGDAEGFGSDPQQCANNDSAQKISNNNNGLTEVLKEIAGLEATPPVRGNETNARETFLGRINDCYKRSLERKIPPSCMTGSMKDSQGKHVILSGSAEVISNEGGRFCYPEFSSGEESEEDVLFSNMEEEHESWDESDEELLAMEIRMRGQPRFANFRANTLSPVRFFVSKKWNTIPLRNKSLQRICAVDYDDSYDEILNGYEENSGVSYGQGSVQSTISSDCTSPGSSFTEESRSETASSLSQKVCNGGISPGNPGNSKDIAETESNFESPPGNNEEKDESLTSKSSVKVPETHKAVLALRLQEKDGKIAVHTEKPESKASTDIAGQAVTISLVPVEEQTKPYRVVNLEQPLCKPYTVVDVSAAMASEHLGRPKIKGSSSTPNSPVTSPALTPGQINAHLKKSSAIRYQEVWTSSTSPRQKIPKIELSTGGPGPNVPPRKNCHKSAPTSPTATNISSKTIPVKSPNLSEIKFNSYNNAGMPPFPIIIHDEPSYARSSKNAIKVPIVINPNAYDNLAIYKSFLGTSGELSVKEKTTSVISHTYEEIETESKVSDSTPSKLTDCPQAKGFSNSTERKRGSVAQKVQEFNNCLNRGQSSPQRSYSSTHSSPAKIQRPTQEPAGKTEGAQGSQVPGSSSNSTREKASAVLCQIVASIQPPQTPPEAPQSSPKACSVEELYAVPPDADTTKSIPKNPPVRPKSLFTSQSSGEGEAHQTTESPTAKIQKDPSTKPVTSPPSKLVTSAQSEPPPPFPPPRSTSSPYHASNLLQRHFTNWTKPTSPTRSTEAESILHSEGSRRAADAKPKRWISFKSFFRRRKTDEEEEKEKEREKGKLVGLDGTVIHMLPPPPVQRHHWFTEAKGEASEKPAIVFMYRCDPDQGHLSVDQSKAGAEKGRAEEVLLRNSEEKKSSYLPSQIPDKACSRVTHEVAGELSPRDPRTPAGKQDGTSVTPTLPPPDLEREEEKDDTLDPTDVSPCSATYSNLGQSRAAMIPPKHPRHPKGAVDDAIAFGEKTDQEGLNASQPTPPPLPKKMIRANTEPISKDLQKAMESSLCVMANPTYDIDPNWDASSAGSSISYELKGLDVESYESLERPLHKERPVPSAANSISSLATLSVKDRFSNSMESLSSRRGLSYRQTRSIQKPQRQALYRGLDNREEVVGKLRSLHTDALKRLAVKCEDLFMAGQKDQLRFGVDSWSDFRLTSDKPCCEAGDAVYYTASYAKDPLSNYAVKICKSKAKESQQYYHSLAVRQSLPVHFNIQQDCGHFLAEVPSRLLPWEDPDAPEKAEDGTEDSEEEGKAETLGGNPEPCSETEPSQKENQRVTNRKQRSHVVVITREVPHLTVADFVRDSLAHHGNSPDLYERQVCLLLLQLCSGLEHLKPYHVTHCDLRLENLLLVQHQPGGAAQGPSPADPCPTLACPTRLIVSNFSQAKQKSHLVDPQILRDQSRLAPEIITATQYKKCDEFQTGILIYEMLHLPNPFDENPELKEKEYTRTDLPRIPLRSPYSWGLQQLASCLLNPNPSERILISDAKGILQCLLWGPREDLFQIFTTSATLAQKNALLQNWLDIKRTLLMIKFAEKSLDREGGISLEDWLCAQYLAFATTDSLSYIVKILQYR

SEQ ID NO: 182 - protein, 539 aa, Mus musculus
MGHQESPLTRAAAGGAAYIKRLRKVLSWRELGDGHGNLEAEASPGSVAVITRAAPRRATRSARLPASRPTRLCRQARLGTDHPPARAPRGNRFARKRNSAGQITIQGPAPPHLGARRRDEARGARAAPLLLPPPPAAMETGKENGARRGTKSPERKRRSPVQRVLCEKLRPAAQAMDPAGAEVPGEAFLARRRPDGGGGDVPARPRYSLLAEIGRGSYGVVYEAVAGRSGARVAVKKIRCDAPENVELALAEFWALTSLKRRHQNIVQFEECVLQRNGLAQRMSHGNKNSQLYLRLVETSLKGERILGYAEEPCYLWFVMEYCEGGDLNQYVLSRRPDPATNKSFMLQLTSAIAFLHKNHIVHRDLKPDNILITERSGTPILKVADFGLSKVCAGLAPRGKEGNQDNKNVNVNKYWLSSACGSDFYMAPEVWEGHYTAKADIFALGIIIWAMIERITFIDSETKKELLGTYIKQGTEIVPVGEALLENPKMELHIPQKRRTSMSEGVKQLLKDMLAANPQDRPDAFELETRMDQVTCAA

SEQ ID NO: 183 - protein, 1450 aa, Mus musculus
MSRGAPFPVPCPVLLGTFTDDSLEAQLHEYAKQGNCVKLKKILKKGVCVDAVNTQGQSALFVAALLGHVKLVDVLVDYGSDPNHRCFDGSTPVHAAAFSGNQWILSKLLTAGGDLRLHDEKGRNPQAWALTAGKDRSTQMVEFMQRCTSHMKAIIQGFSYDLLKKIDSPQRLIGSPPWFGSLIQGSPNSSPNRQLKPGIISAQNIYSFGFGKFYLTSGMQLTYPGSLPVIGEKEVVQADDEPTFSFFSGPYMVMTNLVWNRSRVTVKELNLPTRPHCSRLRLADLLIAEQEHSSNLRHPNLLQLMAVCLSRDLEKIRLVYERIAVGTLFSVLHERRSQFPVLHMEVIVHLLLQVADALIYLHSRGFIHRSLSSYAVHIVSAGEARLTNLEYLTESQDSGAHRNVTRMPLPTQLYNWAAPEVVLQKAATVKSDIYSFSVIIQEILTDSIPWNGLDGSLVKETIALGNYLEADVRLPEPYYDIVKSGIHAKQKNRTMNLQDIRYILKNDLKEFIGAQKTQPTESPRGQSYEPHPDVNICLGLTSEYQKDPPDLDIKELKEMGSQPHSPTDHSFLTVKPTLAPQTLDSSLSAQKPDNANVPSPPAACLAEEVRSPTASQDSLCSFEINEIYSGCLTLGTDKEEECLGTAASPEGDRPNQGDELPSLEEELDKMERELHCFCEEDKSISEVDTDLLFEDDDWQSDSLGSLNLPEPTREAKGKTSSWSKTDEYVSKCVLNLKISQVMMQQSAEWLRKLEQEVEELEWAQKELDSQCSSLRDASLKFANAKFQPAVGPPSLAYLPPVMQLPGLKQPENGGTWLTLARSPGNEREFQEGHFSKKPEKLSACGWKPFTQVSEESRGDCSELNNQLPTLRGPGKQSTGEQLPSTQEARESLEKNTNQNSRSMASVSSEIYATKSRNNEDNGEAHLKWRLAVKEMAEKAVSGQLLLPPWNPQSSAPFESKVENESTPLPRPPIRGPESTEWQHILEYQRENDEPKGNTKFGKMDNSDCDKNKHSRWTGLQRFTGIRYPFFRNHEQPEQNEASQASCDTSVGTEKFYSTSSPIGDDFERFQDSFAQRQGYVEENFQIREIFEKNAEILTKPQFQAIQCAEDKQDETLGETPKELKEKNTSLTDIQDLSSITYDQDGYFKETSYKTPKLKHAPTSASTPLSPESISSAASHYEDCLENTTFHVKRGSTFCWNGQEAMRTLSAKFTTVRERAKSLESLLASSKSLPAKLTDSKRLCMLSETGSSNVSAAFVTSTHATKRKSLPRELAEATSQQHLDELPPPAQELLDEIEQLKQQQVSSLASHENTARDLSVTNKDKKHLEEQETNSSKDSSFLSSREIQDLEDTERAHSSLDEDLERFLQSPEENTALLDPTKGSTREKKNKDQDVVEQKRKKKESIKPERRESDSSLGTLEEDELKPCFWKRLGWSEPSRIIVLDQSDLSD

SEQ ID NO: 184 - protein, 469 aa, Mus musculus
MARGPCWGLARLLRRVVQVDGENSAGQTALFLSALLGHTSAVRLLLAFGANPNHPHPASHPLFIHPALASHSALAAAWMAAHPCMQVPPLGRGLVLWHLLQAGGDLRLRDQQGRTPGDWAEQGDAKQSWEVLELLQWCRTHMSALVQSGELAPSVSLSQLQASSGHSLCGSLPSLRLVQADRALRQGQIRRSPKTPALGFGQLSSLQPPALVMGIPVVDPKELVPTQGEPDRTYNSTLPSCCPHKEILPLALTCCPFSSLLWKGHPVTVRQLKSSESSPDVLLADLQHCSILHHPGLLLLMALSPSEDLSRLSLLFEPVWLGSLYLLLHSVREDEEGLAKVSHLEHGRPLHQPRLQPRLKQDCSQRDPNPGLPPPPELYPWLPLELIHGDVPATTSDLYSFCILAQEVFTGELPWAGGEGPEVKAKLEAGQSPGLDPLLPAPYQALVQAGLGLEPADRWGSLQSTRYLL

SEQ ID NO: 185 - protein, 499 aa, Mus musculus
MAAPEPAPRRGREREREDESEDESDILEESPCGRWQKRREQVNQGNMPGIQSTFLAMDTEEGVEVVWNELHFGDRKAFAAHEEKIQTMFEQLALVDHPNIVKLHKYWLDASEARARVIFITEYVSSGSLKQFLKKTKKNHKAMNARAWKRWCTQILSALSFLHACSPPIIHGNLTSDTIFIQHNGLIKIGSVWYRIFSNALPDDLRSPIRAEREELRNLHFFPPEYGEVNDGTAVDIFSFGMCALEMAVLEIQANGDTRVTEEAIARARHSLSDPNMREFILSCLARDPARRPSAHNLLFHRVLFEVHSLKLLAAHCFIQHQYLMPENVVEEKTKAMDLHAVLAEMPQPHGPPMQWRYSEVSFLELDKFLEDVRNGIYPLMNFAAARPLGLPRVLAPPPEEAQKAKTPTPEPFDSETRKVVQMQCNLERSEDKARWHLTLLLVLEDRLHRQLTYDLLPTDSAQDLAAELVHYGFLHEDDRTKLAAFLETTFLKYRGTQA

SEQ ID NO: 186 - protein, 491 aa, Mus musculus
  misc_feature (94)..(113): Xaa can be any naturally occurring amino acid
MRRRRAAVAAGFCASFLLGSVLNVLFAPGSEPPRPGQSPGSSAAPGPGRRGGRGELARQIRERYEEVQRYSRGGPGPGAGRPERRRLMDLAPGXXXXXXXXXXXXXXXXXXXXWPPAPGPGSPGPGPRIGCAALRNVSGAQYVGSGYTKAVYRVRLPGGAAVALKAVDFSGHDLGSCVREFGARRGCYRLAAHKLLKEMVLLERLRHPNVLQLYGYCYQDSEGIPDTLTTITELGAPVEMIQLLQTSWEDRFRICLSLGRLLHHLAHSPLGSVTLLDFRPRQFVLVNGELKVTDLDDARVEETPCTSSADCTLEFPARNFSLPCSAQGWCEGMNEKRNLYNAYRFFFTYLLPHSAPPSLRPLLDSIVNATGELAWGVDETLAQLETALHLFRSGQYLQNSTSSRAEYQRIPDSAITQEDYRCWPSYHHGGCLLSVFNLAEAIDVCESHAQCRAFVVTNQTTWTGRKLVFFKTGWNQVVPDAGKTTYVKAPG

SEQ ID NO: 187 - protein, 927 aa, Mus musculus
MEADGQSWAGESVSGPGPGGGGMIRELCRGFSRYRRYLGRLRQNLRETQKFFRDIKCSHSHSCPSSPAGGGAAELGPAGDVAEAPLPAGQLSCISFPPMEETYLQQLVDRLPCILILGQDCNAKCQLLNLLLGVQVLPTLKLDSDESCKLRRLRFTYGTRTRVSLALPGQYELVHTLASHQDNWETIPEEDLEVQEDSEDAAHVLADLEVTMHHALLQEVDIVVAPCPSHRPSVDVLSDLANDFLPVITYALHKDELSERGEQELREVRQYFSFPMFFFKVPKLEIISSSSGRAESERSPLYGQLVDLGYLSSSHRNCVPSDQDCKAQSMLVEQSEKLKQLSTFSHQLLQNRLVDAAKALNVVHSHCLDIFINQAFDMQRDLQITPKRLEYTRKKENELYESLMNIANRKQEEMKDMIVETLNTMKEELLDDAANMEFKDVIVPENGETIGTREIKSCIRQIQELIISRLNQAVANKLISSVDYLRESFVGTLERCLQSLEKSQDVSVHITSNYLKQILNAAYHVEVTFHSGSSVTRMLWEQIKQIIQRITWVNPPTITLEWKRKVAQEAIDSLSASKLAKSICSQFRTRLNSSHEAFAASLRQLEAGHSGRLEKTEDLWLKVRKDHAPRLARLSLESRSLQDVLLHRKPKLGQELGRGQYGVVYLCDNWGGHFPCALKSVVPPDEKHWNDLALEFHYMRSLPKHERLVDLHGSVIDYNYGGGSSVAVLLIMERLHRDLYTGLKAGLTLETRLQIALDVVEGIRFLHSQGLVHRDIKLKNVLLDKQNRAKITDLGFCKPEAMMSGSIVGTPIHMAPELFTGKYDNSVDVYAFGILFWYICSGSIKLPEAFERCASKDHLWNNVRRGTRPERLPVFDEECWQLMEACWDGDPLKRPLLGIVQPMLRSIMDRLCKCSSEQPNRGLDDST

SEQ ID NO: 188 - protein, 626 aa, Mus musculus
  misc_feature (364)..(381): Xaa can be any naturally occurring amino acid
MAAAEGSAGRSWALAPAAASTGSTRRPASLSRGCSSGCHLLQMLNPGALGVNLVVEELETETKFLIKQVECIDEHHANKALEELMPLLKLQHPNLSLYHEMFIMWNNEISSLFLCLVMDYYSQGTFQNIMENKRKLKAVVDTEWMHTMLSQVLDAIEYLHKLNIVHRNLKPSNIVLVNSGYCKLQDMSSQALMTHEAKWNVRAEEENTALSGPSTLILSADPCQKSWMAPEALKFSFSTKSDIWSLGCIILDMATCSFLNDTEAMQLRKAIRHHPGSLKPILKTMEEKQIPGTDVYYLLLPFMLHINPSDRLAIKDVMQVTFMSNSFKSSSVALNMQRQKVPIFITDVLLEGNMANILGDGGDXXXXXXXXXXXXXXXXXXCLVSLSHNLVLDLVFMHDYLLDRAPSESSFPALLSMGIKLLGKFCKRLPWPTELLEEVISIIKQHGRILDILLSTCSLLLRVLGQVVTVDKEPLEQLSGMVTWVLATHPEDVEIAEAGCAVLWLLSLLGCIKESQFEQVVVLLLRSIQLCPGRVLLVNNAFRGLASLAKVSELVAFRIVVLEEGSSGLHLIQDIYKLYKDDPEVVENLCMLLAHLTSYKEILPEMESGGIKDLVQVIRGRFTSSL

SEQ ID NO: 189 - protein, 599 aa, Mus musculus
MEPRSRRRRSRQLVATFLRDPGSGRVYRRGKLIGKGAFSRCYKLTDMSTSAVFALKVVPRGGAGRLRLRGKVEREIALHSRLRHRNIVAFHAHFADRDHVYMVLEYCSRQVPLQSLAHVLKVRRTLTEPEVRYYLRGLVSGLRYLHQQRIVHRDLKPSNFFLNKNMEVKIGDLGLAARVGPAGRCHRVLCGTPNFQAPEVVSRNGHSCKSDIWALGCIMYTVLTGTPPFAAAPLSEMYQNIRDGHYLEPTHLSPSARSLIARLLAPDPAERPSLDHLLQDDFFSQGFTPERLPPHSCHSPPVFAFPPPLGRLFRKVGQLLLTQCRPPCPFTSKEASGPGEEGTEPDHMEAGNEERDPLCTEGRIHLLTLGTPRTGLAGPKGSLALQLEVATRKLFLCLDAGPMAGQDPPGEQRPVLWAPKWVDYSLKYGFGYQLSDGGSGVLFRDGSHMALRPQGGHVSYQPDQGTLWTFTLRDVPSPLRAKLAVLRLFACYMQRRLREEGTVPMPATPASPDISLLSFIADSQAMVMLFSNGTVQVSLKTSQTQLVLSGEDEDLLLTLQEPGGPAVGVSYTLDVLRSHGFTLAVHHHLRHGLHLLQSV

SEQ ID NO: 190 - protein, 1316 aa, Mus musculus
MEKYHVLEMIGEGSFGRVYKGRKKYSAQVVALKFIPKLGRSEKELRNLQREIEIMRGLWHPNIVHMLDSFETDKEVVVVTDYAEGELFQILEDDGKLPEDQVQAIAAQLVSALYYLHSHRILHRDMKPQNILLAKGGGIKLCDFGFARAMSTNTMVLTSIKGTPLYMSPELVEERPYDHTADLWSVGCILYELAVGTPPFYTTSIFQLVSLILKDPVRWPSTISSCFKNFLQGLLTKDPRQRLSWPDLLHHPFIAGRVTIITEPAGSDLGTPFTSRLPPELQVLKDEQAHRLAPKGNQSRILRQACKLMAEEAKQKEDQNAGSALEQEDGLCKVTPSTAPVPGLKATPQESSLLAGILASEMKNNWEDWGAGEAPRTSRENHINLECEQGFPEPRPEAMGRQSTDVVDPENEEPDSDDEWQRLLETSEPGPVQLKSPLTLLCNPDFCQRIQSQLRGTGEQILKGVLDGVSHLLPVLRILSSLLSSCNDSVLLYSFCQEAGLPELPLSLLRYSQESSSIQQQPWYGALLRDLVAVVQAYFSCTFNLERSQTGDSLQVFQEAASLFLDLLGKLLAQSDDSEQTFRRDSLMCFAVLCEAVDGNSWAVSKAFYSSLLTTQRAVLDGLLHGLTVPQLPFHTPPGAPQVSQPLREQSEDVPGAISSALAAMCTAPVGLPSCWDAKEQVSWHLANQLTEDSSQLRPSLISGLRHHVLCLHLLKVLYACCYISERLCHILGQEPLALESLLMLVQGKVKVADWEESTEVALYLLSLLVFRLQDLPSGMEKLGSEVATLFTHSHVVSLVNAAACLLGQLGQQGVTFDLQPREWIAAAAHALSAPAEVRLTPPYSCGFYDGLLILLLQLLMQVQGKPGLIRDVVGSEVWTILWHRFSMALRLPEEVSAQEDDLLLSSPSSLEPDWTLISPQGMAALLSLAMAIFTQESQLCLSHLSQHGSVLMLTLKHLLSPSFLHHLSQAPQGPEFLPVVVLSVCKLLCFPFALDVDADLLVGVLADLRASEVVVCLLQVCCHHLSLLQAELPIGLLTRLALTDSASLKQFVNTVATSSRAIISFLSVVLLSDQPLMISDLLSLLTHTARILSPSHLSFIQELLSGSDESYRPLRSLLGHSENTVRVRAYGLLGHLLQHSMALRGALQSQSGLLNLLLLGLGDKDPAVRRSASFAVGNAAYQAGPLGPALAAAVPSMTQLLGDAQDGIRRNAASALGNLGPEGLGKELLKCQVPQRLLEMACGDPQPTVKEAALIALRSLQQESCIHQVLVSLGASEKLALLSLGNQLLPNSSNRPASVRHCRKLIQLLRPTHST

SEQ ID NO: 191 - protein, 472 aa, Mus musculus
MAGPSWGLPRLDGFILTERLGSGTYATVYKAYAKKDTREVVAIKCVAKKSLNKASVENLLTEIEILKGIRHPHIVQLKDFQWDNDNIYLIMEFCAGGDLSRFIHTRRILPEKVARVFMQQLASALQFLHERNISHLDLKPQNILLSSLEKPHLKLADFGFAQHMSPWDEKHVLRGSPLYMAPEMVCRRQYDARVDLWSVGVILYEALFGQPPFASRSFSELEEKIRSNRVIELPLRPQLSLDCRDLLQRLLERDPARRISFKDFFAHPWVDLEHMPSGESLAQARALVVEAVKKDQEGDAAAALSLYCKALDFFVPALHYEVDAQRKEAIKAKVGQYVSRAEELKAIVSSSNQALLRQGTTVQELLREMARDKPRLLAALEVASAALAKEEEAGKEQDALDLYQHSLGELLVLLAAEAPGRRRELLHTEVQNLMARAEYLKEQIKIRESHWEAESLDKEGLSESVRSSCTLQ

SEQ ID NO: 192 - protein, 1275 aa, Mus musculus
MENFVLYEEIGRGSRTVVYKGRRKGTINFVAILCTEKCKRPEITNWVRLTHEIKHKNIVTFHEWYETSNHLWLVVELCTGGSLETVIAQDENLPEDVVREFGVDLVTGLHHLHRLGILFCDLSPGKILLEGPGTLKFSNFCLAKVAGESLEEFFALVAAEEGGGDSGENALKKSMKTRVRGSLIYAAPEIVKGTEFSVTSDLWSLGCLLYEMFSGKPPFFSETVSELVEKILYEDPLPPIPKDSSFPKASSDFLNLLDGLLQKDPQKRFSWEGVLQHPFWKDALRGEDSGWASEDSPFSRNVMECSGPHDSRELLQSPKNGQAKGQKAAHRLSQSFRLENPTELRPKSIMGGQLNESIFLLSSRPTPRTSAMVELNPGEGEDPSSPQKTSPLSKMTSGHLSQGALESQMRELIYTDSDLVITPIIDNPKIMKQPAIKFDPKILHLPAYSVEKLLVLKDQDWNDFLQQVCSQIDSSEKSTGALRAKLNLLCYLCVVATHKEVATRLLHSPLFQLLIQHLRIAPNWDIRSKVARVVGMLALHTTELQENVPVIEAITLLTELIRENFRSGKLKQCLLPTLGQLLYLVATQEEKNQHSRDCWAVPLAAYTVLMRCLREGEERVVNHMAAKIIENVCTTFSAQAQGFTTGEIGPVLWHLFRHSTVDALRITAISALCRITRQSPTAFQNVIEKVGLNAVISSLASAICKVQQYMLTLFTAMLSCGIHLQRLIQEKDFVSTVIRLLDSPSTPIRAKAFLVLLYILIHNRDMLLLSCQARLVMYIERDSRKTSPGKEQQSGNEYLARCLDLLIQHMVQEPPRILGDILNALANVSGRKHPSTVQGKQLKMCLPMMPVVLHLVMSQVFRPQVVTEEFLFSYGTILSHIKSIDLGETNIDGAIGIVASEEFIKVTLSAFEAVIQYPVLLADYRSTVMDYILPPLVSLVQSQNVEWRLFSLRLLSETTTLLVSQEPEDGDEEASCDSDSSLLALIRDELLPQYEHILMEPDPVPAYALKLLVAMTEHNPAFTRLVEESKLVPLIFEVILEHQESILGNTMQSVIALLNNLVAYKDSNMQLLYEQGLVGHVCNMFTETATLCLDRDNKTNTEPASTLLASLLDILLGMLTYTSRIVRQALQVQKSGSRGDTQAAEDLLLLSKPLTDLISLLIPLLPSEDPEISEVSSKCLSILVQLYGGENPESLSPENMVTFANLLMTKEDPKDQKLLLRILKRMVTSNERLLESLKNTGSLLQALERLAPAHSSPVDTIVASLALELLQAVGH

SEQ ID NO: 193 - protein, 1358 aa, Mus musculus
MGNQLAGIAPSQILSVESYFSDIHDFEYDKSLGSTRFFKVARAKHREGLVVVKVFAIQDPTLPLTSYKQELEELKIRLHSAQNCLPFQKAAEKASEKAAMLFRQYVRDNLYDRISTRPFLNNIEKRWIAFQILTAVDQAHKSGVRHGDIKTENVMVTSWNWVLLTDFASFKPTYLPEDNPADFNYFFDTSRRRTCYIAPERFVDGGMFATELEYMRDPSTPLVDLNSNQRARGELKRAMDIFSAGCVIAELFTEGVPLFDLSQLLAYRNGHFFPEQVLNKIEDRSIRDLVTQMINREPEKRLEAEDYLKQQRGNAFPEIFYTFLQPYMAQFAKETFLSADERILVIRKDLGNIIHNLCGHDLPEKAEGESRASGLVVLVSVITSCLQTLKSCDSKLAALELILHLAPRLSVEILLDRITPYLLHFSNDSVPRVRAEALRTLTKVLALVQEVPRNDVNIYPEYILPGIAHLAQDDATIVRLAYAENIALLAETALRFLELVQLKTLNMENEPDNEEVDEATRPNGDYDTELQALHEMVQQKVVTLLSDPENIVKQTLMESGITRLCVFFGRQKANDVLLSHMITFLNDKNDWHLRGAFFDSIVGVAAYVGWQSSSILKPLLQQGLSDAEEFVIVKALNALTCMCQLGLLQKPHVYEFASDIAPFLCHPNLWIRYGAVGFITVVAHQISTADVYCKLMPYLDPYITQPVIQIERKLVLLSVLKEPVSRSIFDYALRSKDIASLFRHLHMRQKKRNGSLLDCPPPEDPTIAQLLKKLLSQGMTEEEEDKLLALKDFMMKSNRAKANAVDQSHLHDSSQKGVIDLAALGITGRQVDLVKTKQEPDEKRARKHVKQDSNVNEEWKSMFGSLEPPNIPQALPKTSDHEVVQPGKPPRSESSAGICVPLSTSPQVSEAAHIPSKKPVIPVVSSTVLPSTYQIRITTCKTELQQLIQQKREQCNAERIAKQMMENAEWESKPPPPGWRPKGLLVAHLHEHKSAVNRIRVSDEHLLFATCSNDGTVKIWNSQKMEGKTTTTRSILTYSRIGGRVKTLTFCQGSHYLAIASDNGAVQLLGIEASKLPKSPKIHPLQSRILDQKEDGCVVDMHHFNSGAQSVLAYATVNGSLVGWDLRSSSNAWTLKHDLKSGLITSFAVDIHQCWLCIGTSSGAMACWDMRFQLPISSHCHPSRARIRRLSMHPLYQSWVIAAVQGNNEVSMWDMETGDRRLTLWASSAPPLSELQPSPHSVHGIYCSPADGNPILLTAGSDMKIRFWDLVSPERSYVVAGSTGSPSVSYYKKIIEGTEVVQEIQNKQKVGPSDDTPRRGPESLPVGHHDIITDIATFQTTQGFIVTASRDGIVKVWK

SEQ ID NO: 194 - protein, 555 aa, Mus musculus
MADTETDQGLNKKLSFSFCEEDTESEGQMTAQDIGGAQSQKPGREESEELEGPVPPTRDELHTSLSRDKESPGPDLWKSVSGPPKCPETPVLHSKSKLPVPTNFSTPKNSLGQPEISLLEKLSSRSSRHMRLTPASLMDEKTSLSLVNINPFTPETYRKLLLQSKGKRKTRDYLEETGEEESKSVQWLPAKRSILQETNMASRYEKEFFEIEKIGVGEFGTVYKCIKRLDGCIYAIKRSAKSFSGLSNELDLHEVYAHAVLGHHPHVVRYYSSWIEDDHVVIQNEYCNGGSLQAAISENTASNNHFQEPKLKDILLQISLGLKYIHNSGMVHLDIKPSNIFICHKMQCDSPVGPEEAESEADWFLNASVMYKIGDLGHATSISKPKVEEGDTRFLANEILQENYQHLPKADIFALGLTIAVAAGAESLPINGDMWHHIRKGNFPEISQELSDDFYGLLKNMIHPAPKERPSAAALARSRILWPFLEKTDELQKQLNLEKSKTATLKRELKKARHIQTPQREVHHCYYQICKGSRHLLVGGRRKAPSSFTRGTSSV

SEQ ID NO: 195 - protein, 2132 aa, Mus musculus
MAEPRARAARLGPQRFLRRSVVESDQEEPPGLEAAETPSAQPPQPLQRRVLLLCKTRRLIAERARGRPAAPAPAAPAAPPGSPSVPSDPGPERAGTQEPSPDPTTASAAAAQVPDGGPRQEEAPAPTQEDAGTTEAKPEPGRARKDEPEEEEDDEDDLKAVATSLDGRFLKFDIELGRGSFKTVYKGLDTETWVEVAWCELQDRKLTKLERQRFKEEAEMLKGLQHPNIVRFYDFWESSAKGKRCIVLVTELMTSGTLKTYLKRFKVMKPKVLRSWCRQILKGLLFLHTRTPPIIHRDLKCDNIFITGPTGSVKIGDLGLATLKRASFAKSVIGTPEFMAPEMYEEHYDESVDVYAFGMCMLEMATSEYPYSECQNAAQIYRKVTCGIKPASFEKVHDPEIKEIIGECICKNKEERYEIKDLLSHAFFAEDTGVRVELAEEDHGRKSTIALRLWVEDPKKLKGKPKDNGAIEFTFDLEKETPDEVAQEMIDSGFFHESDVKIVAKSIRDRVALIQWRRERIWPALQSQEPKDSGSPDKARGLPAPLQVQVTYHAQSGQPGQPEPEEPEADQHLLPPTLPASVTSLASDSTFDSGQGSTVYSDSQSSQQSMVLSSLVDTAPTPASCVCSPPVSEGPGLTHSLPTLGAFQQPATVPGLSVGPVPPPARPPLLQQHFPESSMSFTPVLPPPSTPVPTGPSQPAPPVQQPLPMAQPPTLPQVLAPQPMGTVQPVPSHLPPYLAPTSQVVAPAQLKPLQMPQPPLQPLAQVPPQMPQMPVVPPITPLTGLDGLPQTLTDLPAANVAPVPPPQYFSPAVILPSLTTPLPTSPALPMQAVKLPHPPGTPLAVPCQTIVPNAPAAIPLLAVAPQGVAALSIHPAVAQIPAQPVYPAAFPQMVPGDIPPSPHHTVQSLRATPPQLASPVPPQPVQPSVIHLPEQAAPTAASGTQVLLGHPPSYTADVAAPVSAVSLPPAVLSPPLPDTLLPTVPDLLPKVPSSLAPTVVAASQSAPAQTSSLLLPTNPPLPTGPAVAGPCPAVQLMVEVAQEEQVSQDKPPGPPQSSESFGGSDVTSGRDLSDSCEGTFGGGRLEGRTARKHHRRSTRARSRQERASRPRLTILNVCNTGDKMVECQLETHNHKMVTFKFDLDGDAPDEIATYMVEHDFILPAERETFIEQMKDVMDKAEDMLSEDTDADHGSDTGTSPPHLGTCGLATGEENRQSQANAPVYQQNVLHTGKRWFIICPVAEHPATDTSESSPPLPLSSLQPEASQDPAPYPDQLSLTDKPSFPAAQQLLSQAGSSNPPGGASAPLAPSSPPVTTVIPAAPATSTVPESAAGTAMQAGGPGTHQGPASVHETLQPLAETRSAQCTAQPLSTGQGPCTPALEASRCSTGLGEPISTREVSTQGEPLPASVPEPSPPTGATQSVPGQPPPPLPITVGAISLAAPQLPSPPLGPTAPPPPPSALESDGEGPPPRVGFVDNTIKSLDEKLRTLLYQEHVPTSSASAGTPMEASDRDFTLEPLRGDLPSALSDKTPSLTQQTQPSLEKSETAPAGWALAQREQGASSPMTAESSSSNTLGCDSDAGQVASDSSTAPSVPQDASGSSVPTHMDPKDQNSSVPREALAAPMQSGPGSFTVGSPAQLRGARDSGSPHKRPGQQDNSSPAKTVGRFSVVSTQDEWTLASPHSLRYSAPPDVYLDEIPSSPEVKLAVRRVQTASSIEVGVEEPASSDSGDERPRRRSQVQKQSSLPGTGGVASDFVKKATAFLHRSSRAGSLGPETPSRAGVKVPTISITSFHSQSSYISSDNDSEFEDADIKKELRSLREKHLKEISELQSQQKQEIEALYRRLGKPLPPNVGFFHTAPPMGRRRKTSKSKLKAGKLLNPLVQQLKVVASSTGHLSDSSRGPPTKDPAHASTPPGTKAVQTQQPCSVRASLSTDICSGLASDGGGARGQGWTVYHPTSERGAYKSSSKPRARFLSGPVSVSISLKRLCLGKEHSSRSSTSSLAPGPEPGPQPTLHVQAQVNNSNNKKGTFTDDLHKLVDEWTTKTVGAAQVKPTLNQLKQTQKLHDMEASGDARATSVPRAAVGASCLAPAPGPLSTTATPGATPALPVPIPVFLRPPVISTPGPRLHIT

SEQ ID NO: 196 - protein, 2377 aa, Mus musculus
MSDGAAEKQSGTPGFLTPPAPVPKNGSSSDSSVGEKLGATVADSGVGRTEEYRRRRHTMDKDSRGAAATTTPTEHRFFRRSVICDSNATALELPGLPLSIPQPSVPAVVPQSAPPEPHREETLTATVASQVSQQPSAAASPGEQAVVGSATTTVPSSTSKDRPVSQPSLVGSKEEPPPSRSGSGSGGASAKEAQEDRSQQQDDIEELETKAVGMSNDGRFLKFDIEIGRGSFKTVYKGLDTETTVEVAWCELQDRKLTKSERQRFKEEAEMLKGLQHPNIVRFYDSWESTVKGKKCIVLVTELMTSGTLKTYLKRFKVMKIKVLRSWCRQILKGLQFLHTRTPPIIHRDLKCDNIFITGPTGSVKIGDLGLATLKRASFAKSVIGTPEFMAPEMYEEKYDESVDVYAFGMCMLEMATSEYPYSECQNAAQIYRRVTSGVKPASFDKVAIPEVKEIIEGCIRQNKDERYSIKDLLNHAFFQEETGVRVELAEEDDGEKIAIKLWLRIEDIKKLKGKYKDNEAIEFSFDLERDVPEDVAQEMVESGYVCEGDHKTMAKAIKDRVSLIKRKREQRQLVREEQEKRKQEESSFKQQNEQQASVSQAGIQQLSAASTGIPTAPATSASVSTQVEPEEPEADQHQQLQYQQPSISVLSDGTIDSGQGSSVFTESRVSSQQTVSYGSQHEQAHSTGTAPGHTVSSIQAQSQPHGVYPPSSMAQGQNQGQPSSSLAGVLSSQPIQHPQQQGIQPTVPSQQAVQYSLPQAASSSEGTTAQPVSQPQVSAGTQLPVSQTVATVQGEPHIPVSTQPSVVPVHSGAHFLPMGQPIPTSLLPQYPVSQIPISTPHVSTAQTGFSSVPITMAAGINQPLLTLASSATASSIPGGSPVVPNQLPTLLQPVNQLQSQVHPQLLQPTTVQSIGIPANLGQAAEGPLPSGDVLYQGFPSRLPPQYPGDSNIAPSSNVASVCIHSTVLAPPSMPTEALATQGYFPTVVQPYVESTPLVPMGSVGGQVQVSQPAVSLTQQPPTTSSQQAVLESTQGVSQAAPPEQTPITQSQPTQPVPLVTSADSAHSDVASGMSDGNENAPSSSGRHEGRTTKRHYRKSVRSRSRHEKTSRPKLRILNVSNKGDRVVECQLETHNRKMVTFKFDLDGDNPEEIATIMVNNDFILAIERESFVAQVREIIEKADEMLSEDVSVEPEGDQGLESLQGKDDYGFPGSQKLEGEFKQPIAVSSMPQQIGVPTSSLTQVVHSAGRRFIVSPVPESRLRESKVFTSDISDPVVASTSQAPGMNLSHSASSLSLQQAFSELKHGQMTEGPNTAPPNFNHMAGPTFSPFLASIAGVQTVAASTPSVSVPITSSPLNDISTSVMQSETALPTEKGIVGVTTTSTGVVASGGLTTMSVSESPTSSSAVSSSTVPAVVTVSTPSQPVQASTSGSIASSTGSFPPGTFSTTTATTMGSVVAPDAKPPTVLLQQVASNTAGVAIVTSVSTTTPFPGMASQPSLPLSSSTSAPTLAETMVVSAHSLDKASHSSTAGLGLSFCAPSSSSSSGTAVSTSVSQPGMVHPLVISSAVVSTPGLPQPVVPTSTPLLPQVPNIPPLVQPVVNVPAVQQTLIHSQPQPALLPNQPHTHCPEMDADTQSKAPGIDDIKTLEEKLRSLFSEHSSSGTQHASVSLETPLVVETTVTPGITTTAVAPSKLMTSTTSTCLPPTSLPLGAAGMPVMPVGTPGQVSTPGTHASAPVGTATGVKPGTTPPKPTKTVVPPVGTELSAGTVPCEQLPPFPGPSLIQSQQPLEDLDAQLRRTLSPETITVAPAVGPLSTMSSTTVTEAGTRLQKDGTEGHVTATSSGAGVVKMGRFQVSVTMDDAQKERKNRSEDTKSVHFESSTSESSVLSSSSPESTLVKPEPNGISISGISLDVPDSTHKAPTPEAKSDAGQPTKVGRFQVTTTANKVGRFSVSRTEDKVTELKKEGPVTSPPFRDSEQTVIPAVIPKKEKPELAEPSHLNGPSSDLEAAFLSRGTEDGSGSPHSPPHLCSKSLPVQNLSQSLSNSFNSSYMSSDNESDIEDEDLRLELRRLREKHLKEIQDLQSRQKHEIESLYTKLGKVPPAVIIPPAAPLSGRRRRPTKSKGSKSSRSSSLGNKSPQLSGNLSGQSGTSVLHPQQTLHPAGNTPETGHNQLLQPLKPSPSSDNLYSAFTSDGAISVPSLSAPGQGTSSTNTVGGTVSSQAAQAQPPAMTSSRKGTFTDDLHKLVDNWARDAMNLSGRRGSKGHMNYEGPGMARKFSAPGQLCVPMTSNLGGSTPISAASATSLGHFTKSMCPPQQYGFPPAPFGTQWSGTGGPAPQPLGQFQPVGTASLQNFNISNLQKSISNPPGSNLRTT

SEQ ID NO: 197 - protein, 1751 aa, Mus musculus
MATDSGEPASTEDSEKPDGVSFENRAARAVAPLTVEARIKEKYSTFSASGENIERKRFFRKSVEMTEDDKVAESSRRDERKAATNISRVDKVPTNVLRGGQEVKYEQCSKATSESSKDCFKEKTEKEMEEEAEMKAVATSPSGRFLKFDIELGRGAFKTVYKGLDTETWVEVAWCELQDRKLTKAEQQRFKEEAEMLKGLQHPNIVRFYDSWESTLKGKKCIVLVTELMTSGTLKTYLKRFKVMKPKVLRSWCRQILKGLQFLHTRTPPIIHRDLKCDNIFITGPTGSVKIGDLGLATLMRTSFAKSVIGTPEFMAPEMYEEHYDESVDVYAFGMCMLEMATSEYPYSECQNAAQIYRKVTSGIKPASFNKVTDPEVKEIIEGCIRQNKSERLSIKDLLNHAFFAEDTGLRVELAEEDDCSNSSLALRLWVEDPKKLKGKHKDNEAIEFSFNLEADTPEEVAYEMVKSGFFHESDSKAVAKSIRDRVTLIKKIREKKPAGCLEERRDSQCKYVRNVLPQQQTATLQPTPGPHTAAEYEETEVDQHVRQQFLQGKPQQQSSSVRGDTSSEPTAGPVLHSDTSSHPTVAYSSNQTTSSQVFSSILQAYISVPEQIHSSYQLLGYSKFQGIYLFSFIYHLQEQPKLTQSPVLPVVQGQSSVMPIYAAGVGVVSQSQISPLTIQKVSQIKPVSQPIGAEQQATLQNPDFVRSLNQDVTSVKENTNNPDTPSGNGKQDRNKQRRASCPRPEKGTKFQLTVLQVSVSGDNMVECQLETHNNKMVTFKFDVDGDAPEDIADYMVEDNFVLENEKEKFVEELRAIVGQAQEILHVHSAVEKSIGVDSVALESNSNQTGSSEQVLINSASTQTSNESAPQSSPVGRWRFCINQTIKNREAQSPPSLQPSMAMVPGLHPFPSSRNTSNQAISQNTVFTIENNPGHRELFTSKLDHKDVVDGKIGEHASIETEQSSISYQVEDDRQIMTPATDNSNYSAALVCPVPGECEALTSQAGMFMPTYPNQQAAVLADVHIAYPGESVPIGGNAALTSVLVSSDQKPQSLSVQQPTIDAEFISKEGETTVNTETSSPKAVIATQTPGFEPAVILPATILESDGERPPKMEFADNRIKTLDEKLRNLLYQEHSISSICPESQKDTQSIDSPFSSSAEDILSYSMPEVIAISHCGIQDSPAQSPNFQQTGSKILSNVAASQPAHISVFKKDLNVITSVPSELCLHEMSPDASLPGDPEAYPAAVSSDGTIHLQTGVETEDKRSAIASDPIPLTREFSSDTRALSRCKAMSGSFQRGRFQVITVPQQQPVKMMSFGKDHRPPFNKTTVQSSEQALTFAEAAVSQLIEVEPAMPTHKASVSSRKLRTLYETFKEDKGDPEQGDIVSYSTACETSVSSVATEKNVTSTTEVSVQSGSEPLDKEKNESTPGKQTCTNEFSATLAGNRKSVTKTRPEGDQYLPLREEQAYAQTQNSLFYSPSSPMSSDNESEIEDEDLKVELQRLREKHIQEVVSLQTQQNKELQELYERLRATKDNKAQSSEVPLSPASPRRPRSFKSKLRSRPQSMTHSDNLVVKDALGVESNTVSCQQSPASKKGMFTDDLHKLVDDWTRETVGHFPSKPSLNQLKQSQQKSEAENWNKSCESTPSTMGYTSNWISSLSQIRGAAPTSLPQGLPLPSFHGPLASYGMPHVCQYNAVGAAGYPVQWVGISGPAQQSVVLPTQSGGLFQPGMNLQSFPAPPVQNPASIPPGPK

SEQ ID NO: 198 - protein, 1066 aa, Mus musculus
MTSLLGLAVRLLLFQPALMVFWASQVRQNCRNGSYEISVLMMDNSAYKEPMQNLREAVEEGLDIVRKRLREADLNVTVNATFIYSDGLIHKSGDCRSSTCEGLDLLREITRDHKMGCALMGPSCTYSTFQMYLDTELNYPMISAGSYGLSCDYKETLTRILPPARKLMYFLVDFWKVNNASFKPFSWNSSYVYKNGSEPEDCFWYLNALEAGVSYFSEVLNFKDVLRRSEQFQEILTGHNRKSNVIVMCGTPESFYDVKGDLQVAEDTVVILVDLFSCRQLGKRASNVLSVSLPPSSWWFALGRELSVWPARSDFSLAYLEGTLLFGHMLQTFLENGENVTGPKFARAFRNLTFQGFAGPVTLDDSGDIDNIMSLLYVSLDTRKYKVLMKYDTHKNKTIPVAENPNFIWKNHKLPNDVPGLGPQILMIAVFTLTGILVVLLLIALLVLRKYRRDHALRQKKWSHIPSENIFPLETNETNHISLKIDDDRRRDTIQRVRQCKYDKKKVILKDLKHSDGNFSEKQKIDLNKLLQSDYYNLTKFYGTVKLDTRIFGVVEYCERGSLREVLNDTISYPDGTFMDWEFKISVLNDIAKGMSYLHSSKIEVHGRLKSTNCVVDSRMVVKITDFGCNSILPPKKDLWTAPEHLRQATISQKGDVYSFAIIAQEIILRKETFYTLSCRDHNEKIFRVENSYGKPFRPDLFLETADEKELEVYLLVKSCWEEDPEKRPDFKKIESTLAKIFGLFHDQKNESYMDTLIRRLQLYSRNLEHLVEERTQLYKAERDRADHLNFMLLPRLVVKSLKEKGIVEPELYEEVTIYFSDIVGFTTICKYSTPMEVVDMLNDIYKSFDQIVDHHDVYKVETIGDAYVVASGLPMRNGNRHAVDISKMALDILSFIGTFELEHLPGLPVWIRIGVHSGPCAAGVVGIKMPRYCLFGDTVNTASRMESTGLPLRIHMSSSTIAILKRTDCQFLYEVRGETYLKGRGTETTYWLTGMKDQEYNLPSPPTVENQQRLQTEFSDMIVSALQKRQASGKKSRRPTRVASYKKGFLEYMQLNNSDHDSTYF

SEQ ID NO: 199 - protein, 908 aa, Mus musculus
  misc_feature (335)..(335): Xaa can be any naturally occurring amino acid
MRHFGWARWAIVSSHQDIWVTTAQQLATAFRTHGLPIGLVTSLGPGEKGATEVCKQLHSVHGLKIVVLCMHSALLGGLEQTTLLHCAWEEGLTDGRLVFLPYDTLLFALPYGNRSYLVLDDHGPLQEAYDAVLTVSLESSPESHAFTATEMSGGATANLEPEQVSPLFGTIYDAVILLAHALNRSETHGAGLSGAHLGDHVRALDVAGFSQRIRTDGKGRRLAQYVILDTDGEGSQLVPTHILDTSTWQVQPLGKPIHFPGGSPPAHDASCWFDPNTLCIRGVQPLGSLLTLTIACVLALVGGFLAYFIRLGLQQLRLLRGPHRILLTLQELTSXQRTPSRRRPHVDSGSESRSVVDGGSPRSVTQGSARSLPAFLEHTNVALYQGEWVWLKKFEAGVAPDLRPSSLSFLRKLREMRHENVTAFLGLFVGPGVSAMVLEHCARGSLEDLLQNENLRLDWTFKASLLLDLIRGLRYLHHRRFPHGRLKSRNCVVDTRFVLKITDHGYAEFLESHCSSRPQPAPEELLWTAPELLRGPGKATFKGDVFSLAIILQEVLTRDPPYCSWGLSAEEIIRKVASPPPLCRPLVSPDQGPLECIQLMQLCWEEAPDDRPSLDQIYTQFKSINQGKKTSVVDSMLRMLEKYSESLEDLVQERTEELELERRKTERLLSQMLPPSVAHALKMGTTVEPEYFDQVTIYFSDIVGFTTISALSEPIEVVGFLNDLYTLFDAVLDSHDVYKVETIGDAYMVASGLPRRNGNRHAAEIANLALDILSYAGNFRMRHAPDVPIRVRAGLHSGPCVAGVVGLTMPRYCLFGDTVNTASRMESTGLPYRIHVSQSTVQALLSLDEGYKIDVRGQTELKGKGLEETYWLTGKVGFCRPLPTPLSIKPGDPWQDRINQEIRTGFAK

SEQ ID NO: 200 - protein, 1101 aa, Mus musculus
MASRTRSESPLEPRLYAGAGSRADHPSLVLMLSVVMLVTCLEAAKLTVGFHAPWNISHPFSVQRLGAGLQTVVDKLNSEPVGLGNVSWEFTYTNSTCSAKESLAVFIDQVQKEHISALFGPACPEAAEVIGLLASEWNIPLFDFVGQMAALKDHFWCDTCVTLVPPKQEISAVLRESLRYLGWEHIGVFGGSSADSSWEQVDEMWGAVEDGLQFHFNITASMRYNSSSSDLLQEGLRNMSYVARVIILICSSEDARRILQAAVDLGLDTGEFVFILLQQLEVGFWKEVLTKDKVIRFPKVYESVFLIAPSAYGGGIGDDGFRKQVSQELRRPPFQSSITSEDQVSPYSAYLHDALLLYAQTVEEMRKAEKDFRDGRQLISTLRAGQVTLQGITGPVLLDSQGKRHVDYSVYALQESGNRSLFLPFLHYDSFQKVIRPWRNDSNTSWPHGSLPEYKPGCGFHNDLCKTKPPTVAGSMTVTVTAVIPTVTFLVLASAAAITGLMLWRLRGKVQSHPGDTWWQIRYDSITLLPQHKLSHRGTPVSRRNVSDTSTVKASADCGSLVKRHQDEELFFAPVGLYQGNQVALCYIGDEAEAWVKKPTVRREVCLMCELKHENIVPFFGVCTEPPNICIVTQYCKKGSLQDVMRNSDHEIDWIFKLSFAYDIVNGLLFLHGSPLRSHGNLKPSNCLVDSHMQLKLSGFGLWEFKHGSTWRSYNQEATDHSELYWTAPELLRLRESPCSGTPQGDVYSFAILLRDLIHQQAHGPFEDLEAAPEEIISRIKDPRAPVPLRPSLLEDKGDGRIVALVRECWDESPELRPIFPSIKKTLREASPRGHVSILDSMMGKLETYANHLEEVVEERTRELVAEKRKVEKLLSTMLPSFVGEQLIAGKSVEPEHFESVTIFFSDIVGFTKLCSLSSPLQVVKLLNDLYSLFDHTIQSHDVYKVETIGDAYMVASGLPIRNGAQHADEIATMALHLLSVTTHFQIGHMPEERLKLRIGLHTGPVVAGVVGITMPRYCLFGDTVNMASRMESSSLPLRIHVSQSTAGALLAAGGYHLQKRGTISVKGKGEQTTFWLKGKDGFPVPLPEFTEEEAKVSEIL

SEQ ID NO: 201 - protein, 1291 aa, Mus musculus
MAGPCPGAGVLERAGSCWQDPLAEALSRGRSSPAVTGRGCARSRPLSVVYVLTREPGLGVEPGSGTEAEPLPLRCLREACAQLQGTRPPPQLRSLPFATLALGDTAALDSFYNADVVVLEVSSSLAQPSLFYHLGVRESFSMTNNVLLCSQAELPDLQALREDVFQKNSDCVGSYTLIPYVVTATGRVLCGDAGLLRGIADGLVQAGAGTEALLTPLVGRLVRLLEATPTDSCGYFRETIRQDIRQARERFSGQQLRQELARLQRRLDSVELLSPDIVMNLLLSYRDVQDYSAIIELVETLQALPTCDVAEQHNVCFHYTFALNRRNRPGDREKALAVLLPLVKYEGPVAPDLYCMCGRIYKDMFFTSGFQNAGHLEQAYHWYRKAFDVEPSLHSGINAAVLLIAAGQHFEDSEELRLIGMKLACLLARKGCVEKMQYYWDVGFYLGAQILANDPIQVVLAAEQLYKLNAPIWYLVSVMETFLLYQHFRPTPEPSGGPPLRAHFWLHFLLQSCQPFKMAPPQEDQCLVLVLEINKVLLPARLEIQGTDPVSTVTLSLLDPETQEDPSSWTFPVTSICGISTSKLDQRCCFLYALPPAQDVQLCFPSVERCQRFCGLIQVLVMNPDSSAPTEEAEGAREVLEFDYEYSETGERLVLGRGTYGVVYAGRDRHTRVRIAIKEIPERDSRFSQPLHEEIALHKRLRHKNIVRYLGSASQGGYLKIFMEEVPGGSLSSLLRSVWGPLKDNESTISFYTRQILQGLSYLHENRIVHRDIKGDNVLINTFSGLLKISDFGTSKRLAGITPCTETFTGTLQYMAPEIIDQGPRGYGKAADIWSLGCTVIEMATGRPPFHELGSPQAAMFQVGMYKVHPPVPGSLSAEAQAFLLRTFEPDPRLRASAQELLGDPFLQPGKRSRSPGSPRHTPRPSGAPSGPSSPSADSATQSQTFPRPQAPSQHPPSPPKRCLSYGDTSQLRVPEEPAAEEPASPEESSGLSLLHQESKRRAMLAAVLEQEVPTLAENLLEQEQDSRLSKIHVELLLRCLGAQIHTPNRRQLAQELRTLQAQLRAQSLGPALLKGPLFAFPDAVKQILRRRQIRPHWMFVLDSLLSRAVRAAMAVLDAESEKKAVLPRSEESSKEESQQKPQESQALQSQLPPEQGPPSLMVELGLLRAETDRLRDLLAEKERECQALVQQALHRVHAETRKYAPASETPATLPKDQNLVRWLQELSVDPATIQTLLSHSFTLQTLLTCATQDDLVYTRIRGGMVCRIWRAILAQRAGATSVTPVPRDAE

SEQ ID NO: 202 - protein, 1388 aa, Mus musculus
  misc_feature (149)..(158): Xaa can be any naturally occurring amino acid
  misc_feature (262)..(274): Xaa can be any naturally occurring amino acid
  misc_feature (666)..(669): Xaa can be any naturally occurring amino acid
MNKNRLIHDFLGVVSRGDVECICGLIPEVHSVLGNLDFQHPQTGNTPLITAAEENLAEACEEFLDINFPNSHGLTPLMLAVRDVDLFESLDLLTAYRPDEVLAELLRHHADPKLCDFSGKSAIHYVSQIESWRKQQLLDILMDSMPRPXXXXXXXXXXQQMSFPHLSPFSQVTSEHQEREQVHPVSPPDDAEMVGLTGRMLTTQPSLLKTDGSSEELCGVDVALSPPRPCLDSSLAASAAGEVAPCVLKEQQRQSDGESSSXXXXXXXXXXXXXLPPLSCLPMRSCIFNMEKSPKSPRHRERKVPSLSLSVPKLLEPLSRPLSQSAEFSSSKNHQEVTQEGPVEHTLRGSNCTLWSRNMCSFRKSGKQGVAESWPSQEMEGWDKTKTSGFKEGPSLFSCESVKEDTTPTERERDSGYHVSEMQRGGEDSQYLSSRKKESWTARVVERDSGVEHPILCKLLEVSNSEMTPAEEKEIGNENVPDAKSNSVHKSGAMEPHAASEEVSVPKNGPSVNSDGPAEELEGHRDIEQNRKIPMEEETNPEMNGVVPLTHIAFPGEGTSKGPARAEPHLQRRKRPAQNSNSFNLLAHREHDKLQTNTHRTKLDSRTKARNRAPPNLMVSIQASIKPNMHKNSIKTQVFPALELIDHRPHPSSKFQRRAPLTEKKXXXXKKSTHQTQKPKKQAFPRIGKHAGIKKPGIPLSAETTDPRLHFLDLKYSDMFKEINSASNGPGIYEMFGTPVYCHIREAERHDHRCYREIRTAPSGRCVVNKCQSSESDRCSNSRARLLQKRQHIKPPKPLHGLRQKHRGFISKDKGCKDMGGHTEDSVSEPDGQMKSPGNDFLSSKDDAQLMHLIPIPELSPEQKAPAPVSDLSIVEEIFTEECADEEGILNDDSLTQSLGDLKEPEGLHPQAPLVPSENSWAVLSEKRSGKRVSPEKHNVEPLDKINAEQMFPGYLEFDSLSEKSKTLVSFSSCSFQENLERAPSPTEQHWARSLEQDSLENNSTTYQTFGKISQEILDPGKNEELTDELLGCLVEELLALDEKDNNSCQIMTNEADAKNLNLVFSRRGNTIEELGRETTDVKLQRCINGFRIYDEENFLTSNEKKTLSDKSLNHEEAIFWTKGEILGRGAYGTVYCGLTSLGQLIAVKQVALDTSDKLATEKEYRKLQEEVDLLKALKHVNIVAYLGTCLEENTLSIFMEFVPGGSISSIINRFGPLPEMVFCKYTRQILQGVAYLHDNCVVHRDIKGNNVMLMPTGIIKLIDFGCAKRLAWAGLNGTHSDMLKSMRGTPYWMAPEVINESGYGRKSDIWSIGCTVFEMATGKPPLASMDRMAAMFYIGAHRGLMPPLPARFSEPAADFVRLCLTRDQHERPSALQLLKHSFLKRSQ

SEQ ID NO: 203 - protein, 1334 aa, Mus musculus
GKAEAGRGPRRALRAVYVRSESSQGAAAGGGPEAGALKCLLRACEAEGAHLTSVPFGELDFGETAVLDAFYDADVAIVDMSDISRQPSLFYHLGVRESFDMANNVILYYDTDADTALSLKDMVTQKNTASSGNYYFIPYTVTPCADYFCCESDAQRRASEYMQPNWDTILGPLCMPLVDRFTSLLKDIRVTSCAYYKETLLNDIRKAREKYQGDELAKELTRIKFRMDNIEVLTSDIIINLLLSYRDIQDYDAMVKLVETLKMLPTCDLADQHNIKFHYAFALNRRNSTGDREKALQVMLQVLQSCDHPAPDMFCLCGRIYKDIFLDSGCEEDASRDSAIEWYRKGFELQSSLYSGINLAVLLIVSGQQFETSMELRKIGVRLNSLLGRKGSLEKMNNYWDVGQFFTVSMLASDIGKAVQAAERLFKLKPPVWYLRSLVQNLLLIQRFKKPITEHSPRQERLNFWLDIIFEATNEVTNGLRFPVLVIEPTKVYQPSYVSINNEAEERTVSLWHVSPTEMKQIHEWNFTASSIKGISLSKFDERCCFLYVHDNSDDFQIYFSTEDQCNRFCSLVKEMLNNGVGSTVELEGEADGDTLEYEYDHDANGERVVLGKGSYGIVYAGRDLSNQVRIAIKEIPERDIRYSQPLHEEIALHKYLKHRNIVQYLGSVSENGYIKIFMEQVPGGSLSALLRSKWGPMKEPTIKFYTKQILEGLKYLHENQIVHRDIKGDNVLVNTYSGVVKISDFGTSKRLAGINPCTETFTGTLQYMAPEIIDQGPRGYGAPADIWSLGCTIIEMATSRPPFHELGEPQAAMFKVGMFKIHPEIPEALSAEARAFILSCFEPDPQKRVTAADLLQEGFLRQVNKGKKNRIAFKPSEGVRSGTGTLALPSSGELVGSSSSEHGSISPDSDAQPDAFFEKVQVPKHQLSHLLSVPDESPALDDRSTALPPEERDPGLFLLRKDSERRAILYRILWEEQNQVASNLQECVVQSSEELLLSVSHIKQIIGILRDFIRSPEHRVMAATISKLKVDLDFDSSSINQIHLILFGFQDAVNRILRNHLIRPHWMFAMDNIIRRAVQAAVTILIPELQAHFEPASETEGVDKDTEVEGDYPLVDLLSQEVHVTPRGTRPGSVAIQEGQPHQQDPSLQLSKLRQETNRLWEHLVQKEREYQNLLRLILDQKTQELYHLQLQYKSNGGTENPPPPDGLGTDRELIDWLQLQGVDANTIEKIVEEDYTLSDILNDITKEDLRCLRLRGGVLCRLWHAVSQHRRQMQESWGEWAKSPLHLLMIKASVGVLTNSEFPQKDPCPFNSSTCDCRASLFINKIVSNVSP

SEQ ID NO: 204 - protein, 527 aa, Mus musculus
MSEDSSALPWSINRDDYELQEVIGSGATAVVQAAYCAPKKERVAIKRINLEKCQTSMDELLKEIQAMSQCHHPNIVSYYTSFVVKDELWLVMKLLSGGSVLDIIKHIVAKGEHKSGVLDEPTIATILREVLEGLEYLHKNGQIHRDVKAGNILLGEDGSVQIADFGVSAFLATGGDITRNKVRKTFVGTPCWMAPEVMEQVRGYDFKADIWSFGITAIELATGAAPYHKYPPMKVLMLTLQNDPPSLETGVQDKEMLKKYGKSFRKMISLCLQKDPEKRPTAAELLRHKFFQKAKNKEFLQEKILQRAPTISERSKKVRRVPGSSGRLHKTEDGGWEWSDDEFDEESEEGRAAISQLRSPRVKDSLSSSELFAAAEPMGTLLQVPEQISAHLPQPAGQMPTQPAQVSLLPPAEPAKPAQAQSSGERSQETKIPISLVLRLRNSKKELNDIRFEFTPGRDTAEGVSQELISAGLVDGRDLVIVAANLQKIVEEPQSNRSVTFKLASGVEGSDIPDDGKLIGFAQLSIS

SEQ ID NO: 205 - protein, 1328 aa, Mus musculus
MANDSPAKSLVDIDLSSLRDPAGIFELVEVVGNGTYGQVYKGRHVKTVTAAIKVMDVTEDEEEEITLEINMLKKYSHHRNIATYYGAFIKKSPPGHDDQLWLVMEFCGAGSITDLVKNTKGNTLKEDWIAYISREILRGLAHLHIHHVIHRDIKGQNVLLTENAEVKLVDFGVSAQLDRTVGRRNTFIGTPYWMAPEVIACDENPDATYDYRSDLWSCGITAIEMAEGGPPLCDMHPMRALFLIPRNPPPRLKSKKWSKKFFSFIEGCLVKNYMQRPSTEQLLKHPFIRDQPNERQVRIQLKDHIDRTRKKRGEKDETEYEYSGSEEEEEEVPEQEGEPSSIVNVPGESTLRRDFLRLQQENKERSEALRRQQLLQEQQLREQEEYKRQLLAERQKRIEQQKEQRRRLEEQQRREREARRQQEREQRRREQEEKRRLEELERRRKEEEERRRAEEEKRRVEREQEYIRRQLEEEQRHLEILQQQLLQEQAMLLECRWREMEEHRQAERLQRQLQQEQAYLLSLQHDHRRPHAQQQPPPPQQQDRSKPSFHAPEPKPHYDPADRAREVQWSHLASLKNNVSPVSRSHSFSDPSPKFAHHHLRSQDPCPPSRSEGLSQSSDSKSEVPEPTQKAWSRSDSDEVPPRVPVRTTSRSPVLSRRDSPLQGGGQQNSQAGQRNSTSSIEPRLLWERVEKLVPRPGSGSSSGSSNSGSQPGSHPGSQSGSGERFRVRSSSKSEGSPSPRQESAAKKPDDKKEVFRSLKPAGEVDLTALAKELRAVEDVRPPHKVTDYSSSSEESGTTDEEEEDVEQEGADDSTSGPEDTRAASSPNLSNGETESVKTMIVHDDVESEPAMTPSKEGTLIVRQSTVDQKRASHHESNGFAGRIHLLPDLLQQSHSSSTSSTSSSPSSSQPTPTMSPQTPQDKLTANETQSASSTLQKHKSSSSFTPFIDPRLLQISPSSGTTVTSVVGFSCDGLRPEAIRQDPTRKGSVVNVNPTNTRPQSDTPEIRKYKKRFNSEILCAALWGVNLLVGTESGLMLLDRSGQGKVYPLISRRRFQQMDVLEGLNVLVTISGKKDKLRVYYLSWLRNKILHNDPEVEKKQGWTTVGDLEGCVHYKVVKYERIKFLVIALKSSVEVYAWAPKPYHKFMAFKSFGELLHKPLLVDLTVEEGQRLKVIYGSCAGFHAVDVDSGSVYDIYLPTHIQCSIKPHAIIILPNTDGMELLVCYEDEGVYVNTYGRITKDVVLQWGEMPTSVAYIRSNQTMGWGEKAIEIRSVETGHLDGVFMHKRAQRLKFLCGRNDKVFFSSVRSGGSSQVYFMTLGRTSLLSW

SEQ ID NO: 206 - protein, 1351 aa, Mus musculus
MASDSPARSLDEIDLSALRDPAGIFELVELVGNGTYGQVYKGRHVKTGQLAAIKVMDVTGDEEEEIKQEINMLKKYSHHRNIATYYGAFIKKNPPGMDDQLWLVMEFCGAGSVTDLIKNTKGNTLKEEWIAYICREILRGLSHLHQHKVIHRDIKGQNVLLTENAEVKLVDFGVSAQLDRTVGRRNTFIGTPYWMAPVIACDENPDATYDFKSDLWSLGITAIEMAEGAPPLCDMHPMRALFLIPRNPAPRLKSKKWSKKFQSFIESCLVKNHSQRPATEQLMKHPFIRDQPNERQVRIQLKDHIDRTKKKRGEKDETEYEYSGSEEEEEENDSGEPSSILNLPGESTLRRDFLRLQLANKERSEALRRQQLEQQQRENEEHKRQLLAERQKRIEEQKEQRRRLEEQQRREKELRKQQEREQRRHYEEQMRREEERRRAEHEQEYIRRQLEEEQRQLEILQQQLLHEQALLLEYKRKQLEEQRQAERLQRQLKQERDYLVSLQHQRQEQRPLEKKPLYHYKEGMSPSEKPAWAKEVEERSRLNRQSSPAMPHKVANRISDPNLPPRSESFSISGVQPARTPPMLRPVDPQIPQLVAVKSQGPALTASQSVHEQPTKGLSGFQEALNVTSHRVEMPRQNSDPTSENPPLPTRIEKFDRSSWLRQEEDIPPKVPQRTTSISPALARKNSPGNGSALGPRLGSQPIRASNPDLRRTEPVLESSLQRTSSGSSSSSSTPSSQPSSQGGSQPGSQAGSSERSRVRANSKSEGSPVLPHEPSKVKPEESRDITRPSRPADLTALAKELRELRIEETNRPLKKVTDYSSSSEESESSEEEEEDGESETHDGTVAVSDIPRLIPTGAPGNNEQYNMGMVGTHGLETSHADTFGGSISREGTLMIRETAEEKKRSGHSDSNGFAGHINLPDLVQQSHSPAGTPTEGLGRVSTHSQEMDSGAEYGIGSSTKASFTPFVDPRVYQTSPTDEDEEDDESSAAALFTSELLRQEQAKLNEARKISVVNVNPTNIRPHSDTPEIRKYKKRFNSEILCAALWGVNLLVGTENGLMLLDRSGQGKVYNLINRRRFQQMDVLEGLNVLVTISGKKNKLRVYYLSWLRNRILHNDPEVEKKQGWITVGDLEGCIHYKVVKYERIKFLVIALKNAVEIYAWAPKPYHKFMAFKSFADLQHKPLLVDLTVEEGQRLKVIFGSHTGFHVIDVDSGNSYDIYIPSHIQGNITPHAIVILPKTDGMEMLVCYEDEGVYVNTYGRITKDVVLQWGEMPTSVAYIHSNQIMGWGEKAIEIRSVETGHLDGVFMHKRAQRLKFLCERNDKVFFASVRSGGSSQVFFMTLNRNSMMNW

SEQ ID NO: 207 - protein, 1539 aa, Mus musculus
MAGPGSWRDKEVTDLGQLPDPTGIFSLDKAIGLGTYGRIFLGIHEKTGSLVAVKVMSARKTPLPEIGRRVRVNKYQKSVGWRYSDEEEDLRTELNLLRKYSFHKNIVTFYGAFFKLNPPGHQHQLWMVMELCAAGSVTDVVRMTRNQSLKEDWIAYICREILQGLAHLHAHQVIHRDIKGQNVLLTHDAEVKIVDFGVSAQVSRTNGRRNSFIGTPYWMAPEVIHCDEDPRCSYDYRSDVWSVGITAIEMAEGAPPLCKLQPLEALCVILREAAPKVKSSGWSRKFQNFMENCMIKNFLFRPTSGNMLLHPFVHDIKNERRVVESLTKHLTGIIQKREKKGIPVAFEGEEAAKEQYITRRFRGPSCTPELLRVPTSSRCRPLRVLHGEPPQPRWLPDQEDPQDQELQQLQKAAGVFMPLHSQDNTSKLFPKQVEVAPYLRGAAQVVMPVLVQVEAPPQVSKAAQMLRSLPTQDNKATSPEVQAPVAEGQQAQHEALETEQPKDLDQVPEEFQGQDRAPEQPRQGQAAEQQQIHNPVPEQPPEEDREPEQAEVQEEAVEPPQAEIEDKEPEVVQVHAQVLLPLLSQNRHVLLPLHLDRQLLIPVGEQNEEVPRAQAWDLEASRAVGAVQALIEGLSRDLLRAPNAFVTKPLGPLQIFLENLSTDGFYTEPEPTQKKKSKVASLRKAIAKRLRPKRFRAKALWRLEDFEFSDVETSRRRRHRRWEDIFNQHEEQLRRVENDREDDSSDNDEVFHSIQAEVQIEPHAANPAGNEVHERSAPMPCNRNRTHRVKFSPSVGEEEPSLEEAQPQQQQQQPMNIRPRNCLNPQNFQAQSDSSSEEDSPVTRRKSQSSPPYSTIDQKLLIDIHVPDGFKVGKISPPVYLTNEWVGYNALSEIFWDDWIMPTRPARPPEEDGDYVELYDADANANGDEEVANGAYEDPRDGANGHDDMNNQLDQANGYEGHGAAGYNGGDVGGNHGAAFNGPRANYPRAGILKNGHNDGRALNRGAFGVFGDNAARAFHGAAGEAGAAFGNHGANRGNGRGNRNREANGRNEENGAFGRDQHVFPEFEHEESDRGTETSDSIALEITSFDGEQNSGRPVSSTTMGFPIGRSSPRGSDFGSDILYVGLVEVPEKAAKLPSAVNVNPLSVSPAYNSPILHVYEKDFSSEVYCGSLWGVNLLLGTQSHLYLMDRSGKAEIVKLIKRRPFRQIQVVEQLNLLITISGKKNRLRVYHLSWLRNKILNNDPKSKKRQKAMRKKEEACKAIDKLIGCEHFSVLQHEETTYIAVAVKSSIHLFAWAPKSFDENTAIKVCIDQSADSEGDYMSYEAYIRILAKIQAADPANRFKRPDELLHLLKLKVFPTRDLKPLTVDLAVGSEKTLKIFFSSANGYHIIDAESEVMSEVTLPNNSLEIIIPQNVVILPDCLGLGVMLSLNAEAASEEANEQLLKKILDVWKDIPSSVAFECTKRITGWDQKAIEVRSLQSTILENELKRRSIKKLRFLCARGDKMFFASTLSNDHSRVYLMSLGKLEELHRSYAV

SEQ ID NO: 208 - protein, 1613 aa, Mus musculus
MMLGLESLPDPMETWEIIETIGKGTYGKVYKVANKRDGSLAAVKVLDPVSDMDEEIEAEYNILQFLPSHPNVVKFYGMFYKADRCVGGQLWLVLELCNGGSVTELVKGLLRCGKRLDEAVISYILYGALLGLQHLHCHRIIHRDVKGNNILLTTEGGVKLVDFGVSAQLTSTRLRRNTSVGTPFWMAPEVIACEQQYDSSYDARCDVWSLGITAIELGDGDPPLFEMHPVKMLFKIPRNPPPTLLHPDSWCEEFNHFISQCLIKDFEKRPSVTHLLDHPFIKGTQGKVLCLQKQLAKVLQDQKHRNPVAKTRHERMHTGRPHRVEDAGKCCLEDDLVNLEDEVLDTIIYWLQKRYADALIYTYVGDILIALNPFQNLSIYSPQFSRLYHGVKRSSNPPHIFASADNAYQCLVTFSKDQCIVISGESGSGKTESAHLIVQHLTFLGKADNQTLRQKILQVNSLVEAFGNARTAINDNSSRFGKYLEMMFTPTGAVMGARISEYLLEKSRVIQQAAGEKNFHIFYYIYAGLYHQKKLAEFRLPEEKPPRYIAGETERVMQDITSKESYRTQFEAIQHCFKIIGFADKEVHSVYRILAGILNIGSIEFAAISSQHQTDKSEVPNPEALENAACVLCISSEELQEALTSHCVVTRGETIVRANTVDRAEDVRDAMSKALYGRLFSWIVNRINTLLQPDKNIMNVGILDIFGFEDFQRNSFEQLCINIANEQIQYYFNQHVFALEQMEYKNEGVDAVLVQYEDNRPLLDMFLQKPLGLLALLDEESRFPQGTDQTLVDKFEDNLRCKFFWRPKGVELCYGIQHYAGPVLYDASGVLEKNRDTLPADVVVVLRTSENKLLQQLFSIPLTKTGNLAQTRAKITASSRSLPPHFSAGRAKVDTLEVIRHPEETTNMKRQTMASYFRYSLMDLLSKMVVGQPHFIRCIKPNDDRKALQFSQDRVLAQLRSTGILETVSIRRQGYSHRIFFEEFVKRYYYLAFRAHQTPPANKESCVAILEKSRLDHWVLGKTKVFLKYYHVEQLNLLLREVMGRVVMLQAYTKGWLGARRYKRAKEKREKGAITIQSAWRGYDARRKLKQRSRRRSESEAHIHTAANPQLRFWKKQDLDHAKSSRSARNRQQTERVELRSGVQCCSGGERASEFSKPLLIRNTVQIQEESPTEVMKRRQGTAPLKPTQMGSRCQEIPPGLFLFYPYCVFTCHGLNLESQPAREYIMIGIKLSLLDPSLQLHGKAAPALCDELRGCEPTGLTSRFTRALQSQGPTVGQIFIWPVKYRLPHRWTNTLGGRPLWEYVAVPSTEEDKSSSVFPNTVAWLLYSPIEKRGNDSMGRKEEEIVVSYDMGGMVPVRGREVRGVILIWRQLPDAVSVNIQKDQIPLWGCSIAVPWLQEMDLLLKDHFVLCHQRNGDSLPAVLGNLPARAAMHPQAQSPPTGCDVTSGHADTAAGYTVAELSVAGTDVSPSLVYHTASAHQRLSPCEDSLKPVLPMRVRLGCTSCRCQVLALTQDIRTTAAKEDKTVLYTSQVKSLDISGVSPLEEVQEERTARKTLNCTIVTCNHPRNSTKRWTLRKCEEMTPLGQLLAYTLLKGSRSLTVLSSNMVNGPL

SEQ ID NO: 209 - protein, 682 aa, Mus musculus
MFRKKKKKRPEISAPQNFQHRVHTSFDPKEGKFVGLPPQWQNILDTLRRPKPVVDPSRITRVQLQPMKTVVRGSSVPTEGYISGLLNDIQKLSVISSNTLRGRSPTSRRRAQSLGLLGDDQWAADPDMYLQSPQSEHTDPHGLYLSCNGGTPAGHRQVPWPEPQSPQALPNGMAAKAQSLGPAEFQGASQRCLQQLGACLQSSPPGTSPPMATGRRGVKVAKHSSEEARPQSCLVGSAIGRPGGEGSPSPKNQESSLKHRLFRSMFLSTPATGAASSSKPVPLPQNKPNSAFRPPQKDSSSNLVAKAQSLPSEQPMGTFSPLTTSDTSSPQKSLRTAPAAGPLPGRSSPAGSPRTRHAQISTSNLYLPQDPTVAKGALGGEDTGIVTHEQFKAALRMVVDQGDPRLLLDSYVKIGEGSTGIVCLAREKHSGRQVAVKMMDLRKQQRRELLFNEVVIMRDYQHLNVVEMYKSYLVGEELWVLMEFLQGGALTDIISQVRLNEEQIATVCEAVLQALAYLHAQGVIHRDIKSDSILLTLDGRVKLSDFGFCAQISKDVPKRKSLVGTPYWMAPEVISRSLYATEVDIWSLGIMVIEMVDGEPPYFSDSPVQAMKRLRDSAPPKLKNSYKVSPVLRDFLDRMLVREPQERATAQELLDHPFLLQTGLPECLVPLIQLYRKQTSTC

SEQ ID NO: 210 - protein, 431 aa, Mus musculus
MSFLVSKPERIRRWVSEKFIVEGLRDLELFGEQPPGDTRRKANEASSESIASFSKPEMMSSFLPEGGCYELLTIIGKGFEDLMTVNLARYKPTGEYVTVRRINLEACSNEMVTFLQGELHVSKLFSHPNIVPYRATFIADNELWVVTSFMAYGSAKDLIGTHFMDGMNELAIAYILQGVLKALDYIHHMGYVHRSVKASHILISTDGKVYLSGLRSNLSMISHGQRQRAVHDFPKYSIKVLPWLSPEVLQQNLQGYDAKSDIYSVGITACELANGHVPFKDMPATQMLLEKLNGTVPCLLDTSTIPAEELTMSPSRSIANPGLNDSLAAGSLRPSNGDSPSHPYHRTFSPHFHNFVEQCLQRNPDARPNASTLLNHSFFKQIKRRASEALPELLRPVTPITNFEGSQSQDHSGIFGLVTNLEDLEVDDWEF

SEQ ID NO: 211 - protein, 1240 aa, Mus musculus
MPAGGRAGSLKDPDVAELFFKDDPEKLFSDLREIGHGSFGAVYFARDVRNSEVVAIKKMSYSGKQSNEKWQDIIKEVRFLQKLRHPNTIQYRGCYLREHTAWLVMEYCLGSASDLLEVHKKPLQEVEIAAVTHGALQGLAYLHSHNMIHRDVKAGNILLSEPGLVKLGDFGSASIMAPANSFVGTPYWMAPEVILAMDEGQYDGKVDVWSLGITCIELAERKPPLFNMNAMSALYHIAQNESPALQSGHWSEYFRNFVDSCLQKIPQDRPTSEVLLKHRFVLRERPPTVIMDLIQRTKDAVRELDNLQYRKMKKILFQEAPNGPGAEAPEEEELTPCSQEAEPYTHRAGTLTSLESSHSVPSMSISASSQSSSVNSLADASDNEEEEEEEEEEEEEEEEEGPESREMAMMQEGEHTVTSHSSIIHRLPGSDNLYDDPYQPEMTPGPLQPPAAPPTSTSSSARRRAYCRNRDHFATIRTASLVSRQIQEHEQDSALREQLSGYKRMRRQHQKQLLALESRLRGEREEHSGRLQRELEAQRAGFGTEAEKLARRHQAIGEKEARAAQAEERKFQQHILGQQKKELAALLEAQKRTYKLRKEQLKEELQENPSTPKREKAEWLLRQKEQLQQCQAEEEAGLLRRQRQYFELQCRQYKRKMLLARHSLDQDLLREDLNKKQTQKDLECALLLRQHEATRELELRQLQAVQRTRAELTRLQHQTELGNQLEYNKRREQELRQKHAAQVRQQPKSLKVRAGQLPMGLPATGALGPLSTGTPSEEQPCSSGQEAILDQRMLGEEEEAVPERRILGKEGTTLEPEEQRILGEEMGTFSSSPQKHRSLANEEDWDISEEMKEIRVPSLASQERNIIGQEEAAAWSLWEKEGGNLVDVEFKLGWVQGPVLTPVPEEEEEEEEEGGAPIGTHRDPGDGCPSPDIPPEPPPSHLRQYPTSQLPGLLSHGLLAGLSFAVGSSSGLLPLLLLLLLPLLAAQGGGGLQAALLALEVGLVGLGASYLFLCTALHLPPGLFLLLAQGTALLAVLSLSWRRGLMGVPLGLGAAWLLAWPSLALPLAAMAAGGKWVRQQGPQMRRGISRLWLRILLRLSPMVFRALQGCGAVGDRGLFALYPKTNKNGFRSRLPVPWPRQGNPRTTQHPLAQLTRVWAVCKGWNWRLARASHRLASCLPPWAVHILASWGLLKGERPSRIPRLLPRSQRRLGLSASRQLPPGTVAGRRSQTRRTLPPWR

SEQ ID NO: 212 - protein, 898 aa, Mus musculus
MRKGALKDPEIADLFFKDDPEELFIDLHEIGHGSFGAVYFATNAHTNEVVAVKKMSYSGKQTHEKWQDILKEVKFLQQLKHPNTIEYKGCYLKEHTAWLVMEYCLGSASDLLEVHKKPLQEVEIAAITHGALQGLAYLHFHSLIHRDIKAGNILLTEPGQVKLADFGSASMASPANSFVGTPYWMAPEVILAMDEGQYDGKVDIWSLGITCIELAERKPPLFNMNAMSALYHIAQNDSPTLQSREWTDSFRRFVDYCLHKIPQERPAAVELLRHDFIRRERPPKVLIDLIQRTKDAVRELDNLQYRKMKKILFQETRNGPLNESQEEEEDGEQGSNLNREVDSLGSIHSIPSTSVSTGSRSSSVNSMQEVMDESSSELVMMQEDEGTANSSASTVHKKDHVFVRDEAGHGDPRPEPRPTQSVQSRALHYRNRERFATIKSASLVTRQIHEHEQENELREQMSGYKRMRRQHQKQLIALENKLKAEMDEHRLKLQKEVETHANNSSIELEKLAKKQVATIEKEAKVAAADEKKFQQQILAQQKKDLTTFLESQKKQYKICKEKIKEEMNEDHSTPKKEKQERISKHKENLQHTQAEEEAHLLTQQRLYYDRNCRFFKRKIMIKRHEVEQQNIREELNKKRTQKEMEHAMLIRHDESTRELEYRQLHTLQKLRMDLIRLQHQTELENQLEYNKRRERELHRKHVMELRQQPKNLKAMEMQIKKQFQDTCKVQTKQYKALKNHQLEVTPKNEHKAILKTLKDEQTRKLAILAEQYEQSINEMMASQALRLDEAQEAECQALRLQLQQEMELLNAYQSKIKMQTEAQHERELQKLEQRVSLRRAHLEQKIEEELAALQKERSERIKTLLERQERETETFDMESLRMGFGNLVTLDFPKEDYR

SEQ ID NO: 213 - protein, 1142 aa, Mus musculus
MAENKGGGEAESGGGGSGSAPVTAGAAGPTAQEAEPPLAAVLVEEEEEEGGRAGAEGGAAGPDDGGVAAASSSSAPAASVPAASVGSAVPGGAASTPAPAAAPAPAPAPAPAPAPAPAPAPAPGSSSGPPLGPPASLLDTCAVCQQSLQSRREAEPKLLPCLHSFCLRCLPEPERQLSVPIPGGSNGDVQQVGVIRCPVCRQECRQIDLVDNYFVKDTSEAPSSSDEKSEQVCTSCEDNASAVGFCVECGEWLCKTCIEAHQRVKFTKDHLIRKKEDVSESVGTSGQRPVFCPVHKQEQLKLFCETCDRLTCRDCQLLEHKEHRYQFLEEAFQNQKGAIENLLAKLLEKKNYVHFAATQVQNRIKEVNETNKRVEQEIKVAIFTLINEINKKGKSLLQQLENVTKERQMKLLQQQNDITGLSRQVKHVMNFTNWAIASGSSTALLYSKRLITFQLRHILKARCDPVPAANGAIRFHCDPTFWAKNVVNLGNLVIESKPAPGYTPNVVVGQVPPGTNHISKTPGQINLAQLRLQHMQQQVYAQKHQQLQQMRLQQPPAPIPTTTATTQQHPRQAAPQMLQQQPPRLISVQTMQRGNMNCGAFQAHQMRLAQNAARIPGIPRHSAPQYSMMQPHLQRQHSNPGHAGPFPVVSAHNPINPTSPTTATMANANRGPTSPSVTAIELIPSVTNPENLPSLPDIPPIQLEDAGSSSLDNLLSRYISGSHLPPQPTSTMNPSPGPSALSPGSSGLSNSHTPVRPPSTSSTGSRGSCGSSGRTAEKSAHSFKSDQVKVKQEPGTEEEICSFSGAVKQEKTEDGRRSACMLSSPESSLTPPLSTNLHLESELDTLTGLENHVKTEPTDISESCKQSGLSNLVNGKSPIRNLMHRSARIGGDGNSKDDDPNEDWCAVCQNGGDLLCCEKCPKVFHLTCHVPTLLSFPSGDWICTFCRDIGKPEVEYDCDNMQHSKKGKTAQGLSPVDQRKCERLLLYLYCHELSIEFQEPVPVSIPNYYKIIKKPMDLSTVKKKLQKKHSQHYQIPDDFVADVRLIFKNCERFNEMMKVVQVYADTQEINLKGDSEVAKAGKAVALYFEDKLSEIYSDRTFTPLPEFEQDEDDGEVTEDSDEDFIQPRRKRLKSDERPVHIK

SEQ ID NO: 214 - protein, 1339 aa, Mus musculus
MSAIGTLQVLGFLLSLARGSEMGNSQAVCPGTLNGLSVTGDADNQYQTLYKLYEKCEVVMGNLEIVLTGHNADLSFLQWIREVTGYVLVAMNEFSVLPLPNLRVVRGTQVYDGKFAIFVMLNYNTNSSHALRQLRFTQLTEILLGGVYIEKNDKLCHMDTIDWRDIVRVPDAEIVVKNNGGNCPPCHEVCKGRCWGPGPEDCQILTKTICAPQCNGRCFGPNPNQCCHDECAGGCSGPQDTDCFACRHFNDSGACVPRCPAPLVYNKLTFQLEPNPHIKYQYGGVCVASCPHNFVVDQTFCVRACPADKMEVDKNGLKMCEPCRGLCPKACEGTGSGSRYQTVDSSNIDGFVNCTKILGNLDFLITGLNGDPWHKIPALDPEKLNVFRTVREITGYLNIQSWPPHMHNFSVFSNLTTIGGRSLYNRGFSLLIMKNLNVTSLGFRSLKEISAGRVYISANQQLCYHHSLNWTRLLRGPAEERLDIKYNRPLGECVAEGKVCDPLCSSGGCWGPGPGQCLSCRNYSREGVCVTHCNVLQGEPREFVHEAHCFSCHPECQPMEGTSTCNGSGSDACARCAHFRDGPHCVNSCPHGILGAKGPIYKYPDAQNECRPCHENCTQGCKGPELQDCLGQAEVLMSKPHLVIAVTVGLTVIFLILGGSFLYWRGRRIQNKRAMRRYLERGESIEPLDPSEKANKVLARIFKETELRKLKVLGSGVFGTVHKGIWIPEGESIKIPVCIKVIEDKSGRQSFQAVTDHMLAVGSLDHAHIVRLLGLCPGSSLQLVTQYLPLGSLLDHVRQHRETLGPQLLLNWGVQIAKGMYYLEEHSMVHRDLALRNVMLKSPSQVQVADFGVADLLPPDDKQLLHSEAKTPIKWMALESIHFGKYTHQSDVWSYGVTVWELMTFGAEPYAGLRLAEIPDLLEKGERLAQPQICTIDVYMVMVKCWMIDENIRPTFKELANEFTRMARDPPRYLVIKRASGPGIPPAAEPSALSTKELQDAELEPDLDLDLDVEVEEEGLATTLGSALSLPTGTLTRPRGSQSLLSPSSGYMPMNQSNLGEACLDSAVLGGREQFSRPISLHPIPRGRQTSESSEGHVTGSEAELQERVSMCRSRSRSRSPRPRGDSAYHSQRHSLLTPVTPLSPPGLEEEDGNGYVMPDTHLRGTSSSREGTLSSVGLSSVLGTEEEDEDEEYEYMNRKRRGSPARPPRPGSLEELGYEYMDVGSDLSASLGSTQSCPLHPMAIVPSAGTTPDEDYEYMNRRRGAGGSGGDYAAMGACPAAEQGYEEMRAFQGPGHQAPHVRYARLKTLRSLEATDSAFDNPDYWHSRLFPKANAQRI

SEQ ID NO: 215 - protein, 1041 aa, Mus musculus
MRGSGPRGAGHRRTQGRGGGDDTPRVPASLAGCYSAPLKGPLWTCLLLCAALRTLLASPSNEVNLLDSRTVMGDLGWIAFPKNGWEEIGEVDENYAPIHTYQVCKVMEQNQNNWLLTSWISNEGASRIFIELKFTLRDCNSLPGGLGTCKETFNMYYFESDDENGRSIKENQYIKIDTIAADESFTELDLGDRVMKLNTEVRDVGPLSKKGFYLAFQDVGACIALVSVRVYYKKCPSVVRHLAIFPDTITGADSSQLLEVSGSCVNHSVTDDPPKMHCSAEGEWLVPIGKCMCKAGYEEKNGTCQVCRPGFFKASPHSQTCSKCPPHSYTHEEASTSCVCEKDYFRKDSDPPTMACTRPPSAPRNAISNVNETSVFLEWIPPADTGGRKDVSYYIACKKCNSHAGVCEECGGHVRYLPQQIGLKNTSVMMVDLLAHTNYTFEIEAVNGVSDLSPGTRQYVSVNVTTNQAAPSPVTNVKKGKIAKNSISLSWQEPDRPNGIILEYEIKYFEKDQETSYTIIKSKETSITAEGLKPASVYVFQIRARTAAGYGVFSRRFEFETTPVSVAASNDQSQIPIIAVSVTVGVILLAVMIGFLLSGSCCDCGCGRASSLCAVAHPSLIWRCGYSKAKQDPEEEKMHFHNGHIKLPGVRTYIDPHTYEDPNQAVHEFAKEIEASCITIERVIGAGEFGEVCSGCLKLPGKRELPVAIKTLKVGYTEKQRRDFLGEASIMGQFDHPNIIHLEGVVTKSKPVMIVTEYMENGSLDTFLKKNDGQFTVIQLVGMLRGIAAGMKYLSDMGYVHRDLAARNILINSNLVCKVSDFGLSRVLEDDPEAAYTTRGGKIPIRWTAPEAIAFRKFTSASDVWSYGIVMWEVVSYGERPYWEMTNQDVIKAVEEGYRLPSPMDCPAALYQLMLDCWQKDRNSRPKFDEIVNMLDKLIRNPSSLKTLVNASSRVSTLLAEHGSLGSGAYRSVGEWLEAIKMGRYTEIFMENGYSSMDAVAQVTLEDLRRLGVTLVGHQKKKIMSSLQEMKVQMVNGMVPV

SEQ ID NO: 216 - protein, 1130 aa, Mus musculus
MQFPSPPAARSSPAAQAASSPQAAAPAPGQPGPSCPAHRASRGGRPGTSPADRVEEEEEEEEEEESLVQDPHATRNTWLRCCHFFLRRRREPTRAMGGCEVREFLLQFGFFLPLLTAWTGDCSHVSNQVVLLDTTTVMGELGWKTYPLNGWDAITEMDEHNRPIHTYQVCNVMEPNQNNWLRTNWISRDAAQKIYVEMKFTLRDCNSIPWVLGTCKETFNLYYIESDESHGTKFKPSQYIKIDTIAADESFTQMDLGDRILKLNTEIREVGPIERKGFYLAFQDIGACIALVSVRVFYKKCPFTVRNLAMFPDTIPRVDSSSLVEVRGSCVKSAEERDTPKLYCGADGDWLVPLGRCICSTGYEEIEGSCHACRPGFYKAFAGNTKCSKCPPHSSTYVEATSVCHCEKGYFRAEKDPPSMACTRPPSAPRNVAFNINETALILEWSPPSDTGGRKDLTYSVICKKCGLDTTQCEDCGGGLRFIPRHTGLINNSVVVLDFVSHVNYTFEIEAMNGVSELSISPKPFTAITVTTDHDAPSLIGMMRKDWASQNSLALSWQAPAFSNGAILDYEIKYYEKEHEQLTYSSTRSKAPSVIVTGLKPATTYIFHIRVRTATGYSGYSQKFEFETGDETSDMAAEQGQILVIATAAVGGFTLLVILTLFFLITGRCQWYIKAKMKSEEKRRTHLQNGHLRFPGIKTYIDPDTYEDPSLAVHEFAKEIDPSRIRIERVIGAGEFGEVCSGRLKTPGKREIPVAIKTLKGGHMDRQRRDFLREASIMGQFDHPNIIRLEGVVTKRSFPAIGVEAFCPSFLRAGFLNGIQAPHPVTAGGSLPPRIPAGRPVMIVVEYMENGSLDSFLRKHDGHFTVIQLVGMLRGIASGMKYLSDMGYVHRDLAARNILVNSNLVCKVSDFGLSRVLEDDPEAAYTTTGGKIPIRWTAPEAIAYRKFSSASDAWSYGIVMWEVMSYGERPYWEMSNQDVILSIEEGYRLPAPMGCPPSLHQLMLHCWQKERNHRPKFTDIVSFLDKLIRNPSALHTLVEDILVMPESPGDVPEYPLFVTVGDWLDSIKMGQYKSNFMAAGFTTFDLISRMSIDDIRRIGVILIGHQRRIVSSIQTLRLHMMHIQEKGFHV

SEQ ID NO: 217 - protein, 1469 aa, Mus musculus
MPGPPASPPPPMLLLLLLLTVGCARAAPLPQTGAGEVPVVEVPSLFVILSVCSLLILIVLIANCVSCCKDPEIDFKEFEDNFDDEIDFTPPAEDTPSIQSPAEVFTLSVPNISLPAPSQFQASVEGLKSQVARHSLNYIQEIGSGWFGKVLGETYTGTSVARVIVKELKVSASPKEQDTFLKSGEPYILQHPNVLQCVGQCVEAIPYLLVFEFCDLGDLKAYLHNEQEHVRGDSQTMLLQRMACEIAAGLAAMHKLHFLHSDLALRNCYLTSDLNVKVGDYGIGFSRYKEDYIETDDKKVFPLRWTAPELVTSFQDRLLTADQTKYSNIWSLGVTLWELFNNAAQPYANLSDLDVLNQVIRERDMKLPKPQLEQPYSDRWYEVLQFCWLPPDKRPAAEDVHRLLTYLRMQSQRDSEVDFEQQWTALKPDTNSRDASSSAAFPILDHFARDRLGREMEEVLTVTETSQGLSFEYVWEAAKHDHFDEQGRGHPDEALSYSSMFFPVEVFENSLSDPGPGKQDDSGQEVPVRAPGVVPVFDAHNLSVGSDYYIQLEEKSSSNLGLDPPALLTTEVDKLERAGAEEPRTEEDFFQSSAHPKEASSTEDSRATSIPGSPFNLFSDLDKADDLPSHQKIFDLMELNGVQADFKPAILSSSLDDPKDTCQSDKEKPHKLLDQGPLCLSESLLHQDHFDPLSVQELSENFLFLQEKNLLKGSLTTKEQVSDLQTELKNAGFTSALLESPQRGSESSELEFLENTLDFPLSQGDTRGQNEGAGVRRHSGTSPQASPALLTEEGSPTAPTDPILKPEETKSFRDVRVPEDSICLELGPDPVTVGVEIPATDAKTLDGGNRPPDVTCQSKEALSLTNRHPILVNDITAQGSVESCLPESRQDLQNEPFSEDPLSVSSLEKHSEAAETLNQLNSKAAPEDAALASALSSDSTSQDSLLEDSLSTPIPTSEQSVETPDSLDSVDVREALLESLGSHTPRKLLPPDKPADSGYETENLESPEWTLHPAPEGTADSDAAAAGDSGHSSLPPNPVIVISDAGDGHRGAEGPPQSFTLGPQSSYRDSAYFSDNDSEPDKKPEEVPGTSANALVLVKGQSPPESVVPEESSDVREGCLEAPQDKPDQSRVSTLQNSCHSELQETLQPTPADASRESCPVNDEASSPLSLLNSEPSSCDDLDTQEDRPCTLASTGTNTNELLAYMSSTLDKSLPSHLESSKLKEPDIEGKYLGKLCVSGMLDLSEDGMDADEEDENSDDSDEDLRAFNLHSLSSESEDDTEHPVPIIVSNDDGRHLRSLLKPSAAEAIEQLPEDWKKEKKAVTFFDDVTVYLFDQETPTKELGHCGGEAHGPGPSSPAASSSSPYLGRCMNSESSTDEEGGGFEWDDDFSPDPFMSKTTSLLGSKPSLQTSKYFSPPPPARSAEQSWPHVSPCSRFSISPANIASFSLTHLTDSDIEQGGSSEDGDKD

SEQ ID NO: 218 - protein, 1431 aa, Mus musculus
  misc_feature (1209)..(1362): Xaa can be any naturally occurring amino acid
MPAPGALILLAAVSASGCLASPAHPDGFALSRAPLAPPYAVVLISCSGLLAFIFLLLTCLCCKRGDVRFKEFENPEGEDCSGEYTPPAEETSSSQSLPDVYILPLAEVSLPMPAPQPPHSDISTPLGLSRQHLSYLQEIGSGWFGKVILGEVFSDYSPAQVVVKELRASAGPLEQRKFISEAQPYRSLQHPNVLQCLGVCVETLPFLLIMEFCQLGDLKRYLRAQRPPEGMSPELPPRDLRTLQRMGLEIARGLAHLHSHNYVHSDLALRNCLLTSDLTVRIGDYGLAHSNYKEDYYLTPERLWVPLRWAAPELLGELHGSFVLVDQSRESNVWSLGVTLWELFEFGAQPYRHLSDEEVLAFVVRQQHVKLARPRLKLPYADYWYDILQSCWRPPAQRPSASDLQLQLTYLLSERPPRPPPPPPPPRDGPFPWPWPPSHSAPRPGTLSSQFPLLDGFPGADPDDVLTVTESSRGLNLECLWEKARRGAGRGGGAPPWQPASAPPAPHTNPSNPFYEALSTPSVLPVISARSPSVSSEYYIRLEEHGSPPEPLFPNDWDPLDPGVPGPQAPQTPSEVPQLVSETWASPLFPAPRPFPAQSSGSGGFLLSGWDPEGRGAGETLAGDPAEVLGEQGTAPWAEEEEEESSPGEDSSSLGGGPSRRGPLPCPLCSREGPCSCLPLERGDAVAGWGDHPALGCPHPPEDDSSLRAERGSLADLPLVPPTSAPLEFLDPLMGAAAPQYPGRGPPPAPPPPPPPPRASAEPAASPDPPSALASPGSGLSSPGPKPGDSGYETETPFSPEGAFPGGGAAEEEGVPRPRAPPEPPDPGAPRPPPDPGPLPLPGSQEKPTFVVQVSTEQLLMSLREDVTKNLLGDKGSTPGETGPRKAGRSPANREKGPGPNRDLTSLVSRKKVPSRSLPVNGVTVLENGKPGVPDMKEKVAENGLESPEKEERALVNGEPMSPEAGEKVLANGVLMSPKSEEKVAENGVLRLPRNTERPPEIGPRRVPGPWEKTPETGGLAPETLLDRAPAPCEAALPQNGLEMAPGQLGPAPKSGNPDPGTEWRVHESGGAPRAPGAGKLDLGSGGRALGGVGTAPAGGPASAVDAKAGWVDNSRPLPPPPQPLGAQQRRPEPVPLKARPEVAQEEEPGVPDNRLGGDMAPSVDEDPLKPERKGPEMPRLFLDLGPPQGNSEQIKAKLSRLSLALPPXXXXXXXXXXXXXXXXXXXXXXXXXXXXXXXXXXXXXXXXXXXXXXXXXXXXXXXXXXXXXXXXXXXXXXXXXXXXXXXXXXXXXXXXXXXXXXXXXXXXXXXXXXXXXXXXXXXXXXXXXXXXXXXXXXXXXXXXXXXXXXXXXXXXXXXXXXPPHPTTPGDGFPNSDNGFGGSFEWAEDFPLLPPPGPPLCFSRFSVSPALETPGPPARAPDARPAGPVEN

SEQ ID NO: 219 - protein, 517 aa, Mus musculus
MGCVFCKKLEPASKEDVGLEGDFRSQTAEERYFPDPTQGRTSSVFPQPTSPAFLNTGNMRSISGTGVTIFVALYDYEARTGDDLTFTKGEKFHILNNTEYDWWEARSLSSGHRGYVPSNYVAPVDSIQAEEWYFGKISRKDAERQLLSSGNPQGAFLIRESETTKGAYSLSIRDWDQNRGDHIKHYKIRKLDTGGYYITTRAQFDSIQDLVRHYMEVNDGLCYLLTAPCTTTKPQTLGLAKDAWEIDRNSIALERRLGTGCFGDVWLGTWNCSTKVAVKTLKPGTMSPKAFLEEAQIMKLLRHDKLVQLYAVVSEEPIYIVTEFMCYGSLLDFLKDREGQNLMLPHLVDMAAQVAEGMAYMERMNYIHRDLRAANILVGEYLICKIADFGLARLIEDNEYNPQQGTKFPIKWTAPEAALFGRFTVKSDVWSFGILLTELITKGRVPYPGMNNREVLEQVEHGYHMPCPPGCPASLYEVMEQAWRLDPEERPTFEYLQSFLEDYFTSTEPQYQPGDQT

SEQ ID NO: 220 - protein, 2478 aa, Mus musculus
MASGACQGCEEEEEEEALKKLIVRLNNVQEGKQIETLLQLLEDMLVFTYSDRASKLFEDKNFHVPLLIVLDSYMRVASVQQAGWSLLCKLIEVCPGTLQSLIGPQDIGNDWEVLGIHRLILKMLTVHHANVNLSIVGLKALDLLLDSGKLTLLILDEECDIFLLIFDAMHRYSANDEVQKLGCKALHVLFERVSEEQLTEFVENKDYTILLSTFGSFRRDKEIVYHVLCCLHSLAVTCSNVEVLMSGNVRCYNLVVEAMKAFPTNENIQEVSCSLFQKLTLGNFFNILVLNEVHVFVVKAVRQYPENAALQISALSCLALLTETIFLNQDLEERSETQEQSEEEDSEKLFWLEPCYKALVRHRKDKHVQEAACWALNNLLMYQNSLHEKIGDEDGQFPAHREVMLSMLMHSSSKDVFQAAAHALSTLLEQNVNFRKILLAKGVYLNVLELMQKHAHAPEVAESGCKMLSHLFEGSNPSLDTMAAVVPKILTVMKAHGTSLSVQLEALRAILHFVVPGLLEESREDSQCRPNVLRKQCFRTDIHKLVLVALNRFIGNPGIQKCGLKVISSLAHLPDATETLSLQGAVDSVLHTLQMYPDDQEIQCLGLHLMGCLMTKKNFCIGTGHLLAKILASTLQRFKDVAEVQTTGLQTTLSILELSVSFSKLLVHYSFDVVIFHQMSSSVVEQKDEQFLNLCCKCFAKVAVDDELKNTMLERACDQNNSIMVECLLLLGADANQVKGATSLIYQVCEKESSPKLVELLLNGGCREQDVRKALTVSIQKGDSQVISLLLRKLALDLANNSICLGGFGIGKIDPSWLGPLFPDKSSNLRKQTNTGSVLARKVLRYQMRNTLQEGVASGSDGKFSEDALAKFGEWTFIPDSSMDSVFGQSDDLDSEGSESSFLVKRKSNSISVGEVYRDLALQRCSPNAQRHSNSLGPVFDHEDLLRRKRKILSSDESLRSSRLPSHMRQSDSSSSLASEREHITSLDLSANELKDIDALSQKCCLSSHLEHLTKLELHQNSLTSFPQQLCETLKCLIHLDLHSNKFTSFPSFVLKMPRITNLDASRNDIGPTVVLDPAMKCPSLKQLNLSYNQLSSIPENLAQVVEKLEQLLLEGNKISGICSPLSLKELKILNLSKNHIPSLPGDFLEACSKVESFSARMNFLAAMPALPSSITSLKLSQNSFTCIPEAIFSLPHLRSLDMSHNNIECLPGPAHWKSLNLRELIFSKNQISTLDFSENPHVWSRVEKLHLSHNKLKEIPPEIGCLENLTSLDVSYNLELRSFPNEMGKLSKIWDLPLDGLHLNFDFKHVGCKAKDIIRFLQQRLKKAVPYNRMKLMIVGNTGSGKTTLLQQLMKMKKPELGMQGATVGIDVRDWSIQIRGKRRKDLVLNVWDFAGREEFYSTHPHFMTQRALYLAVYDLSKGQAEVDAMKPWLFNIKARASSSPVILVGTHLDVSDEKQRKACISKITKELLNKRGFPTIRDYHFVNATEESDALAKLRKTIINESLNFKIRDQPVVGQLIPDCYVELEKIILSERKAVPTEFPVINRKHLLQLVNEHQLQLDENELPHAVHFLNESGVLLHFQDPALQLSDLYFVEPKWLCKVMAQILTVKVDGCLKHPKGIISRRDVEKFLSKKKRFPKNYMMQYFKLLEKFQIALPIGEEYLLVPSSLSDHRPVIELPHCENSEIIIRLYEMPYFPMGFWSRLINRLLEISPFMLSGRGCILLGRVVDHIDSLMEEWFPGLLEIDICGEGETLLKKWALYSFNDGEEHQKILLDELMKKAEEGDLLINPDQPRLTIPISQIAPDLILADLPRNIMLNNDELEFEEAPEFLLGDGSFGSVYRAAYEGEEVAVKIFNKHTSLRLLRQELVVLCHLHHPSLISLLAAGIRPRMLVMELASKGSLDRLLQQDKASLTRTLQHRIALHVADGLRYLHSAMIIYRDLKPHNVLLFTLYPNAAIIAKIADYGIAQYCCRMGIKTSEGTPGFRAPEVARGNVIYNQQADVYSFGLLLHDIWTTGSRIMEGLRFPNEFDELAIQGKLPDPVKEYGCAPWPMVEKLITKCLKENPQERPTSAQVFDILNSAELICLMRHILIPKNIIVECMVATNLNSKSATLWLGCGNTEKGQLSLFDLNTERYSYEEVADSRILCLALVHLAAEKESWVVCGTQSGALLVINVEEETKRHTLEKMTDSVTCLHCNSLAKQSKQSNFLLVGTADGNLMIFEDKAVKCKGAAPLKTLHIGDVSTPLMCLSESLNSSERHITWGGCGTKVFSFSNDFTIQKLIETKTNQLFSYAAFSDSNIIALAVDTALYIAKKNSPVVEVWDKKTEKLCELIDCVHFLKEVMVKLNKESKHQLSYSGRVKALCLQKNTALWIGTGGGHILLLDLSTRRVIRTIHNFCDSVRAMATAQLGNLKNVMLVLGYKRKSTEGIQEQKEIQSCLSIWDLNLPHEVQNLEKHIEVRTELADKMRKTSVE

SEQ ID NO: 221 - protein, 2004 aa, Mus musculus
MYWCVGTEGLAVCPGPAMETHNGAEDMGSKLSLPGGSSTVQCPSMEEIHTAYKQRNLSRARDLLRGVCEESESSQEKGQLLSIAAAHGDLETVQFLLTEKRVELPTEPTDDNPAVVAAHFGHAEVVRELLESLPGPCTPQRLLNWMLALACQRGHLEVVKLLVLTHGADPENYAVRKNEFPVIVRLPLYAAIKAGNEDIAIFLLRHGAYFCSYILLDSPEPSKHLLRKYFIEASALPSSYPGKIALRVKWSHLKLPWVDLDWLLDISCQITELDLSANCLPSLPSIIPWGLINLKKLNLSNNQLGELPCVQSSDEIICSRLLEIDISSNKLSHLPPGFLHLSKLQKLTASKNYLERLFEEENATNWIGLRKLQELDLADNRLTELPVQFMHSFKSLTSLNVSRNNLKSFPDPWSCPLKCCKASKNALESLPDKMAVFWKSHLRDADFSENSLKEVPLGLFQLDALMFLRLQGNQLLSLPPQEKWTCTQLKTLDLSRNQLGKNEDGLKTKRISLFTTRGRQRSGTETASMLEFPAFLSESLEVLCLNDNHLDAVPPSVCLLKNLSELYLGNNPGLRELPPELGQLGNLWQLDIEDLNISNVPAEVRKEGPKATLSFLRAQLRKAEKCKLMKMILVGPPRQGKSTLLEILQTGKAPQLAHSEATIRTTKWELQRPAGSKAKVESVEFNVWDIGGPASMATVNQCFFTDKALYVVVWNLALGEEAVANLQFWLLNIEAKAPNAVVLVVGTHLDLIEAKFRVERIATLRAYVLALCRSPSGSRATGFPDITFKHLHEISCKNLEGQEGLRQLIFHVTCNMKDVGSTIGCQKLAGRLIPRSYISLQEAVLAEQQRRSLGDQVQYLTDRQLDQLVEQTPGNDIKDYEDLQSAISFLIETGTLLHFPDTSHGLRNLYFLDPIWLSECLQRIFNIKGSRSVAKNGVIQAEDLRMLLVGTGFTQQTEEQYFQFLAKFEIALPVANDSYLLPHLLPSKPGLDTHSMRHPMANTIQRVFKMSFVPVGFWQRFIARMLISLAEMDLQLFENKKNTKSRNRKVTIYSFTGSQRNRCSTFRVRRNQTIYWQEGLLVTFDGGYLSVESSDVNWKKKKSGGIKIICQSEMRDFSAMAFITDHVNSLIDQWFPALTATESDGTPLMEQYVPCPVCEASWAQHADPNERSESVQYFDMEDCVLTAIERDFISCPRHPDLPVPLQELVPELFMTDFPARLFLENSKLEHTEGENSILGQGGSGTVIYQARYQGQPVAVKRFHIKKFKNSANAPADTMLRHLRAMDAMKNFSDFRQEASMLHALQHPCIVSLIGISIHPLCFALELAPLGSLNTVLSENAKDSSFMPLGHMLTQKIAYQIASGLAYLHKKNIIFCDLKSDNILVWSLSAKEHINIKLSDYGISRQSFHEGALGVEGTPGYQAPEIRPRIVYDEKVDMFSYGMVLYELLSGQRPALGHHQLQIVKKLSKGIRPVLGQPEEVQFHRLQALMMECWDTKPEKRPLALSVVSQMKDPTFATFMYMLPCGKQSAFFSSQSQEYTVVFWDGKEESRNYTVVNTEKGLLEVQRMTCPGMKLSCQLKVQSSVWIATEDQKIYIYSLKGMCPLSVPQQALDTPAVVTCFLAVPVIKKNSFLVLAGLADGLVAVFPVARGTPKESCSYLCSHTANRSKFCIPDEDARQNPYPVKAMEVVNSGSEVWYSNGPGLLVIDCTILDISRRLEPYAAPSMVTSLVCSSDCRGEEMVWCLDDKANCLVMYHSATYQLCARYFCGDPNPLRDTFSVQPSVLETPGSHKTTSKGPVEECIADVSIMYSEELGTQILTHQDSLTDYCSMSSYSSSPPHQDPRSPSSLPSSLTSYSSVPFSANYEDSDRLQEPSVTSDRTEHDLSPMDGETFSQHLQAVKVLAVKDLIWVPRHGGDIIVIGLEKDSGAQRGRVIAVLKARELNRHGVLVDAAVVAKDTVVCSFANENTEWCLAVWRGWGAREFDIFYQSYEELGRLEACTRKRR

SEQ ID NO: 222 - protein, 959 aa, Mus musculus
MANPQEHLSCSSLPHLPLTENKTSGGRNELAAMGNHPSPKLPEDPQERGAIQSELMEITGSPISTTVLTSVSEDSRGQFENSVLQLREQDESEMTLSLGNSNTVDGENTNGPEDIKIQFSRSGSGSGGFLEGLFGCLRPVWNIIGKAYSTDYKLQQQDTWEVPFEEISELQWLGSGAQGAVFLGKFRAEEVAIKKVREQNETDIKHLRKLKHPNIIAFKGVCTQAPCYCIIMEYCAHGQLYEVLRAGRKITPRLLVDWSTGIASGMNYLHLHKIIHRDLKSPNVLVTHTDAVKISDFGTSKELSDKSTKMSFAGTVAWMAPEVIRNEPVSEKVDIWSFGVVLWELLTGEIPYKDVDSSAIIWGVGSNSLHLPVPSTCPDGFKILMKQTWQSKPRNRPSFRQTLMHLDIASADVLATPQETYFKSQAEWREEVKKHFEKIKSEGTCIHRLDEELIRRRREELRHALDIREHYERKLERANNLYMELSAIMLQLEMREKELLKREQAVEKKYPGTYKRHPVRPIIHPNAMEKLMKRKGVPHKAGVQTKRPDLLRSEGIPSTEAVPTASPLSGSPKMSTASSRSRYRSKPRHRRGNSRGSHSDFAAILKTQPAQENSPHPTYMHHTQAQCASVHQHNPLQQQYQQIPPAQPQSRHPRLNAHGQDIATCANNLRYFGPAAALRSPLSNHAQRQMPGSSPDLISTAMAADWRNSELDQDQVGPWGCCQAEPYDPCFQCRPEHSGSLDVPTTEPVGRSPDLSSSPAHNPLSGNAQGSERTGANGFSGCQSGISHQFTPPMLPQKTRPLQKSGDDSSEEEGEVDSEVEFPRRQRPHRCISSYQSYSTFSSENFSVSDGEEGNTSDHSNSPDESANRRQDRLAETLDDLLSQTPEAPIEISSHSDGLSDKECAVRRVKTQMSLGKLCAEERGYENPVQFGDSDCDSSEGECSDATVRTSKNYSSATW

SEQ ID NO: 223 - protein, 940 aa, Mus musculus
MEEEEGAAAREWGATPAGPVWTAVFDYEAVGDEELTLRRGDRVQVLSQDCAVSGDEGWWTGQLPSGRVGVFPSNYVAPAAPAAPSDLQLPQEIPFHELQLEEIIGVGGFGKVYRAVWRGEEVAVKAARLDPERDPAVTAEQVRQEARLFGALQHPNIIALRGACLSPPNLCLVMEYARGGALSRVLAGRRVPPHVLVNWAVQVARGMNYLHNDAPVPIIHRDLKSINILILEAIENHNLADTVLKITDFGLAREWHKTTKMSAAGTYAWMAPEVIRLSLFSKSSDVWSFGVLLWELLTGEVPYREIDALAVAYGVAMNKLTLPIPSTCPEPFARLLEECWDPDPHGRPDFGSILKQLEVIEQSALFQMPLESFHSLQEDWKLEIQHMFDDLRTKEKELRSREEELLRAAQEQRFQEEQLRRREQELAEREMDIVERELHLLMSQLSQEKPRVRKRKGNFKRSRLLKLREGSSHISLPSGFEHKITVQASPTLDKRKGSDGASPPASPSIIPRLRAIRLTPMDCGGSSGSGTWSRSGPPKKEELVGGKKKGRTWGPSSTLQKERAGGEERLKALGEGSKQWSSSAPNLGKSPKHTPMAPGFASLNEMEEFAEADEGNNVPPSPYSTPSYLKVPLPAEPSPCVQAPWEPPAVTPSRPGHGARRRCDLALLSCATLLSAVGLGADVAEARAGDGEEQRRWLDSLFFPRPGRFPRGLSPTGRPGGRREDTAPGLGLAPSATLVSLSSVSDCNSTRSLLRSDSDEAAPAAPSPPPSPLAPSPSTNPLVDVELESFKKDPRQSLTPTHVTAAHAVSRGHRRTPSDGALRQREPLELTNHGPRDPLDFPRLPDPQALFPTRRRPLEFPGRPTTLTFAPRPRPAASRPRLDPWKLVSFGRTLSISPPSRPDTPESPGPPSVQPTLLDMDMEGQSQDNTVPLCGVYGSH

SEQ ID NO: 224 - protein, 784 aa, Mus musculus
MAALSGGGGSSSGGGGGGGGGGGGGDGGGGAEQGQALFNGDMEPEAGAGAAASSAADPAIPEEVWNIKQMIKLTQEHIEALLDKFGGEHNPPSIYLEAYEEYTSKLDALQQREQQLLESLGNGADFSVSSSASMDTVTSSSSSSLSVLPSSLSVFQTPTDASRNNPKSPQKPIVRVFLPNKQRTVVPARCGVTVRDSLKKALMMRGLIPECCAVYRIQDGEKKPIGWDTDISWLTGEELHVEVLENVPLTTHNFVRKTFFTLAFCDFCRKLLFQGFRCQTCGYKFHQRCSTEVPLMCVNYDQLDLLFVSKFFEHHPVPQEEASFPETALPSGSSSAPPSDSTGPQILTSPSPSKSIPIPQPFRPADEDHRNQFGQRDRSSSAPNVHINTIEPVNIDDLIRDQGFRGDGGSTTGLSATPPASLPGSLTNVKALQKSPGPQRERKSSSSSSSEDRSRMKTLGRRDSSDDWEIPDGQITVGQRIGSGSFGTVYKGKWHGDVAVKMLNVTAPTPQQLQAFKNEVGVLRKTRHVNILLFMGYSTKPQLAIVTQWCEGSSLYHHLHIIETKFEMIKLIDIARQTAQGMDYLHAKSIIHRDLKSNNIFLHEDLTVKIGDFGLATVKSRWSGSHQFEQLSGSILWMAPEVIRMQDKNPYSFQSDVYAFGIVLYELMTGQLPYSNINNRDQIIFMVGRGYLSPDLSKVRSNCPKAMKRLMAECLKKKRDERPLFPQILASIELLARSLPKIHRSASEPSLNRAGFQTEDFSLYACASPKTPIQAGGYGGFPVH

SEQ ID NO: 225 - protein, 965 aa, Mus musculus
GVAEQAMDEENMTKSEEQQPLSLQKALQQCELVQNMIDLSISNLEGLRTKCAASNDLTQKEIRTLESKLVKYFSRQLSCKKKVALQERNAELDGFPQLRHWFRIVDVRKEVLEEISPDQLSLEDLLEMTDEQVCETVEKYGANQEECARLNASLSCLRNVHKSGGNLSKQDWIIQWPTTEPGQESNPVCPPEPSPWIRTHLSQSPRVQTKCPQHFCPTSPTPGTPVYTQVDRLTVDAYPNLCPPPPPLESGHRSLPPSPRQRHVVRTPPRTPNIVTTVTPPGTPPMRRKNKLKPPGTPPPSSRKLIHLIPGFTALHRSKSHEFQLGNRVDEANTPKAKKKSKPLNLKIHSGVGSCENIPAQQRSPLLSERSLRSFFVGHGPFLPSTPPVHTEANFSANTLSVPRWSPQIPRRDLGNSIKHRFSTKYWMSQTCTVCGKGMLFGLKCKNCKLKCHNKCTKEAPPCHLLIIHRGDSLCCFYPTDPARLVRTESVPCDINNPVRKPARYSDLHISQTLPKTNKINKDHIPVPYQPDSSSNPSSTTSSTPSSPAPPLPPSATPPSPLHPSPQCPRQKKNFNLPASHYYKYKQQFIFPDVVPVPETPTRAPQVILHPVTSNTILEGNPLLQIEVEPTSENEESHNEAEESEDEFEEMNLSLLSARSFPRKASQTSIFLQEWDIPFEQLEIGELIGKGRFGQVYHGRWHGEVAIRLIDIERDNEDQLKAFKREVMAYRQTRHENVVLFMGACMSPPHLAIITSLCKGRTLYSVVRDAKIVLDVNKTRQIAQEIVKGMGYLHAKGILHKDLKSKNVFYDNGKVVITDFGLFSISGVLQAGRRDDKLRIQNGWLCHLAPEIIRQLSPDTEEDKLPFSKHSDVFALGTIWYELHAREWPFKTQPAEAIIWQMGTGMKPNLSQIGMGKEISDILLFCWAFEQEERPTFTKLMDMLEKLPKRNRRLSHPGHFWKSAE

SEQ ID NO: 226 - protein, 1158 aa, Mus musculus
MLTKQNNSFQRSKRRYFKLRGRTLYYAKTAKSIIFDEVDLTDASVAESSTKNVNNSFTVITPCRKLILCADNRKEMEDWIAALKTVQNKEHFEPTQYSMDHFSGMHNWYACSHARPTYCNVCREVLSGVTSHGLSCEVCKFKAHKRCAVRATSNCKWTTLASIGKDIIEDEDGIAMPHQWLEGNLPVSAKCIVCDKTCGSVLRLQDWRCLWCKAMVHTSCKESLVMKCPLGLCKVSVIPPTALNSIDSDGFWKATCPPSCTSPLLVFVNSKSGDNQGVKFLRRFKQLLNPAQVFDLMNGGPHLGLRLFQKFDTFRILVCGGDGSVGWVLSEIDSLNLHKQCQLGVLPLGTGNDLARVLGWGSACDDDTQLPQILAKLERASTKMLDRWSVMAYETKLPRQASSSTVTEDFSEDSEVQQILFYEDSVAAHLSKILTSDQHSVVISSAKVLCETVKDFVARVGKAYEKTTESSQESEVMAKKCSVLKEKLDSLLKTLDDESQASSSLSNPPPTIAEEAEDGDGSGNICSSTGDHLVGSACPSRPQIFRPREQLMLRANSLKKAIRQIIEHTEKAVDEQNAQTQEQQGFVLGLSESEKKDLKTDNRVCTSSVHSESCVIAKGRSQRKASRAPCEKLVSKGLSLGSSASLPPGTGSRDSLPALNTKILYPSVRAGMSGSLPGGSVISRLLINADPFNAEPENLEYYTEKCVMNNYFGIGLDAKISLDFNNKRDEHPEKCRSRTKNMMWYGVLGTKELLHRTYRNLEQKVLLECDGRPIPLPSLQGIAVLNIPSYAGGTNFWGGTKEDDTFAAPSFDDKILEVVAVFGSMQMAVSRVIKLQHHRIAQCRTVKISILGDEGVPVQVDGEAWIQPPGYIRIVHKNRAQTLTRDRAFENTLKSWEDKQKCELSRPPSFSLHPEILSEEEATQMDQFGQAAGGLIHSIREIAQSHRAMEQELAHAVNASSKAMERVYGKPRTAEGLNCSFVLEMVNNIRALRSETELLLAGKMALQLDPPQKERLGAALIEMDQQLRKLTDTPWLCQPLEPGEEENVMLDLTKRSRSGKFRLVTKFKKEKNNKNKEVHSNLGGPVHLWGTEEVAAWLEHLSLCEYKDIFTRHDIRGSELLHLERRDLKDLGVTKVGHMKRILCGIKELSRSSPAAEA

SEQ ID NO: 227 - protein, 1041 aa, Mus musculus
MDAAGRGCHLLPLPAARGPARAPAASSALSPTGLCSGTTSASFAAAGAVAMNPSSSAGEERGATGGSSSSGSGAGSCCLGAEGGADPRGAGAAAAAALEEPAAAGQKEKEEALEEKLRDLTFRKQVSYRKAISRTGLQHLAPAHPLGLPVANGPAKEPRATLDWSENAVNGEHLWLETNVSGDLCYLGEENCQVRFAKSALRRKCAVCKIVVHTACIEQLEKINFRCKPTFREGGSRSPRENFVRHHWVHRRRQEGKCKQCGKGFQQKFSFHSKEIVAISCSWCKQAFHNKVTCFMLHHIEEPCSLGAHAAVIVPPTWIIKVKKPQNSLKASNRKKKRTSFKRKASKRGTEQETKGRPFVIKPISSPLMKPLLVFVNPKSGGNQGTKVLQMFMWYLNPRQVFDLSQEGPKDALEMYRKVPNLRILACGGDGTVGWILSILDELQLSPQPPVGVLPLGTGNDLARTLNWGGGYTDEPVSKILCQVEDGTIVQLDRWNLHVERNPDLPPEELEDGVCKLPLNVFNNYFSLGFDAHVTLEFHESREANPEKFNSRFRNKMFYAGAAFSDFLQRSSRDLSKHVKVVCDGTDLTPKIQDLKFQCIVFLNIPRYCAGTMPWGNPGDHHDFEPQRHDDGYIEVIGFTMASLAALQVGGHGERLHQCREVMLLTYKSIPMQVDGEPCRLAPAMIRISLRNQANMVQKSKRRTSMPLLNDPQSVPDRLRIRVNKISLQDYEGLHYDKDKLREACKLLVPEGHLVSLFGLAIPLGILVVRGDCDLETCRMYIDRLQEDQETSFPRALSAQRLSPRWCFLDDRSQEHLHFVMEISHDEIFILDPDMVVSQQAGTPPGMPDLVVEQASGLSDWWNPALRKRMLSDSGMITPHYEDSDLKDFSHSRVLQSPVSSEDHAILQAVLTGDLMKLMESYKNGGSLLIQGPGHCSLLHYAAKTGNGDIVKYILDHGPAELLDMADSETGETALHKAACQRNRAVCQLLVDAGASLRQTDSKGKTPQERAQQAGDPDLAAYLESRQNYKIIGHEDLETAV

SEQ ID NO: 228 - protein, 934 aa, Mus musculus
MAAAAEPGARTWPGSGSPRLGSPAGSPVLGISGRTRPGSGPERTSRAIGSAAPGHSFRKVTLTKPTFCHLCSDFIWGLAGFLCDVCNFMSHEKCLKQVKTPCTSIAPSLVRVPVAHCFGSLGLYKRKFCVVCRKSLEVPAFRCEVCELHVHPDCVPFACSDCRQCHQDGQQDYDTYHHHWREGNLPSGARCEVCRKTCGSSDVLAGVRCEWCGVQAHSVCSTALAPECTFGRLRSMVLPPSCVRLLSRNFSKMHCFRIPETMVLELGDGDDGVDGSAAIGTGREVLTATESTKQTLKIFDGNDSMRKNQFRLVTVSRLARNEEVMEAALRAYYISEDPKDFQLQALPLSGNAQALGKAGTTEEEASKGSCPRDSVPEAWVIRSLPRTQEILKIYPGWLKVGVAYVSIRVNSQSTARSVVQEVLPLFGQQVEDKERFQLIEVLMSSRQVQRTVLADEEPLLDRLWDIRQTSVRQVSQTRFYVAETRATAPRVSLFVGGLPPGLSPQDYSNLLHEAMATKAAVVSVSHVYSLQGAVILDVTCFAEAERLYMLARDTAVHGRPLTALVLPDVLHTKLPPDCCPLLVFVNPKSGGLKGRELLCSFRKLLNPHQVFELTNGGPLPGFHLFSQVPSFRVLVCGGDGTVGWVLAALEETRRHLACPEPSVAILPLGTGNDLGRVLRWGAGYSGEDPFSVLVSVDEADAVLMDRWTILLDAHEIDSTENNVVETEPPKIVQMNNYCGIGIDAELSLDFHQAREEEPGKFTSRFHNKGVYVRVGLQKISHSRSLHKEIRLQVEQQEVELPSIEGLIFINIPSWGSGADLWGSDNDSRFEKPRIDDGLLEVVGVTGVVHMGQVQGGLRSGIRIAQGSYFRVTLLKATPVQVDGEPWVQAPGHMIISATAPKVHMLRKAKQKPRKAGANRDTRVDTLPAPEGNPL

SEQ ID NO: 229 - protein, 229 aa, Mus musculus
FFHMIDTLTTTYVIMENVAGEDLEKYLRALGCLKEEEARPVFQQVVSAVHFLHQRHIAHRNIKLESILVDAAGNAKLCDFGMAIKTTEGQMLEETCGSLLYRAPEILARKPYDGLAVDMWSLGIVLYVLVTGHFPYVEATIEDMHRVITTTVCPIPYHLSFPCHIIIAWLLGVPTWHRMTIHQLVERPWLGHIQDHGLVATKEILPRIVNTMCTIGYTCEEIVSSLTNR

SEQ ID NO: 230 - protein, 179 aa, Mus musculus
LKDEVMATFNILKYQLSYGDSHQQVEKPWANSSPSGALIPLPHLKRRSSEPTFSTCIEARKSNFQDENVERRSKSCRSYPIHTKSSCTERMPYSDDPVPESDAVTADVTNSATGDIVVNRDSTNSMLGEHVSPLSAHVGPTASRSRSLTVWKRISRALKSLWCCCCCCCCCCICVPSPR

SEQ ID NO: 231 - protein, 158 aa, Mus musculus
MKRILSEISIFKTLHHPNIICLYQVLLTSKHVHLVTEFAPGGTLFDMIMDDGPLRKEEATKIFRQIVSAIKYCHNFDIIHKDIKPQNIMEDEDGLMKLIDFGLATKQTPGTLLHMKCRTKCYAAPEIFLGEPYDGKKADVWSMGVLLCFITTGYYPTV

SEQ ID NO: 232 - protein, 12 aa, Mus musculus
IFQLGSLEESET

SEQ ID NO: 233 - protein, 249 aa, Mus musculus
  misc_feature (94)..(94): Xaa can be any naturally occurring amino acid
RMFAQIVHAVQYCHGHHIVHTDIKASNSLINYRRTTKLCDFVLAAKVIPGQKLVDFFGTLPDFAPELLKAEEFEGLPVDIWSLEVLMLAGSLPXKDWSYVEVRWQIITVNISIPYDSINIFNIIIEILNINPCRRLTILQIMRHPMIRDRDSEAGLPPNSTQIFPGTPSPSMVRTMRVIGYKFDRNTFSCSSQEEFSGSLQAPKSVPLTDSSSGDTFQKKKTLMEERNLSQKEAIKQEEAIIQNVAIIQ

SEQ ID NO: 234 - protein, 229 aa, Mus musculus; identical to SEQ ID NO: 229

SEQ ID NO: 235 - protein, 20 aa, Mus musculus
LKDEVMATFNILKYQLSYGD

SEQ ID NO: 236 - protein, 7 aa, Artificial Sequence
  Description of Artificial Sequence: Conserved peptide
  MOD_RES (4)..(6): Variable amino acid
HGDXXXN

SEQ ID NO: 237 - protein, 5 aa, Artificial Sequence
  Description of Artificial Sequence: Conserved motif
HRDLK

SEQ ID NO: 238 - DNA, 20 bp, Artificial Sequence
  Description of Artificial Sequence: Primer
ggagctgtcgtattccagtc

SEQ ID NO: 239 - DNA, 21 bp, Artificial Sequence
  Description of Artificial Sequence: Primer
aacccctcaagacccgtttag

1. An isolated, enriched or purified nucleic acid molecule encoding a kinase polypeptide, wherein said nucleic acid molecule comprises a nucleotide sequence that:
(a) encodes a polypeptide having an amino acid selected from the group consisting of those set forth in SEQ ID NO:115 though 228 through 235;
(b) is the complement of the nucleotide sequence of (a);
(c) hybridizes under stringent conditions to the nucleotide molecule of (a) and encodes a kinase polypeptide;
(d) encodes a polypeptide having an amino acid sequence of at least one domain selected from the group consisting of an N-terminal domain, a C-terminal catalytic domain, a catalytic domain, a C-terminal domain, a coiled-coil structure region, a proline-rich region, a spacer region and a C-terminal tail of SEQ ID NO:115 through 235; or
(e) is the complement of the nucleotide sequence of (d).

2. The nucleic acid molecule of claim 1, further comprising a vector or promoter effective to initiate transcription in a host cell.

3. The nucleic acid molecule of claim 1, wherein said nucleic acid molecule is isolated, enriched, or purified from a mammal.

4. The nucleic acid molecule of claim 1, wherein said nucleic acid molecule is a cDNA molecule.

5. The nucleic acid molecule of claim 1, wherein said nucleic acid molecule is a genomic DNA molecule.

6. The nucleic acid molecule of claim 3, wherein said mammal is a mouse.

7. A nucleic acid molecule of claim 1 comprising a nucleic acid having a nucleotide sequence which hybridizes under stringent conditions to a nucleotide sequence encoding a kinase polypeptide having an amino acid sequence selected from the group consisting of those set forth in SEQ ID NO:115 through 235.

8. An isolated, enriched or purified nucleic acid molecule encoding a fusion polypeptide comprising at least one domain selected from the group consisting of an N-terminal domain, a C-terminal catalytic domain, a catalytic domain, a C-terminal domain, a coiled-coil structure region, a proline-rich region, a spacer region and a C-terminal tail of SEQ ID NO:115 through 235, and a heterologous polypeptide.

9. A nucleic acid molecule of claim 1 comprising a nucleic acid having a nucleotide sequence which hybridizes under stringent conditions to a nucleotide sequence selected from the group consisting of those set forth in SEQ ID NO:1 through 114.

10. An isolated, enriched, or purified kinase polypeptide, wherein said polypeptide comprises:
(a) an amino acid sequence at least about 90% identical to a sequence selected from the group consisting of those set forth in SEQ ID NO:115 through 235; or
(b) an amino acid sequence selected from the group consisting of at least one domain selected from the group consisting of an N-terminal domain, a C-terminal catalytic domain, a catalytic domain, a C-terminal domain, a coiled-coil structure region, a proline-rich region, a spacer region and a C-terminal tail of SEQ ID NO:115 through 235.

11. The kinase polypeptide of claim 10, wherein said polypeptide is isolated, purified, or enriched from a mammal.

12. The kinase of claim 11, wherein said mammal is a mouse.

13. A fusion polypeptide comprising the polypeptide of claim 10 and a heterologous polypeptide.

14. An antibody or antibody fragment having specific binding affinity to a kinase polypeptide or to a domain of said polypeptide, wherein said polypeptide comprises an amino acid sequence selected from those set forth in SEQ ID NO:115 through 235.

15. A hybridoma which produces the antibody of claim 14.

16. A kit comprising an antibody which binds to a polypeptide of claim 10 and a negative control antibody.

17. A method for identifying a substance that modulates the activity of a kinase polypeptide comprising the steps of:
(a) contacting the kinase polypeptide substantially identical to an amino acid sequence selected from the group consisting of those set forth in SEQ ID NO:115 through 235 with a test substance;
(b) measuring the activity of said polypeptide; and
(c) determining whether said substance modulates the activity of said polypeptide.

18. The method of claim 17, further comprising attaching the kinase polypeptide to a solid support.

19. A method for identifying a substance that modulates the activity of a kinase polypeptide in a cell comprising the steps of:
(a) expressing a kinase polypeptide having a sequence that is at least about 90% identical to an amino acid sequence selected from the group consisting of those set forth in SEQ ID NO:115 through 235 in said cell;
(b) adding a test substance to said cell; and
(c) monitoring kinase activity in the cell.

20. A method for treating a disease or disorder by administering to a patient in need of such treatment a substance that modulates the activity of a kinase substantially identical to an amino acid sequence selected from the group consisting of those set forth in SEQ ID NO:115 through 235.

21. A method for detection of a kinase nucleic acid in a sample as a diagnostic tool for a disease or disorder, wherein said method comprises:
(a) contacting said sample with a nucleic acid probe which hybridizes under hybridization assay conditions to a nucleic acid target region of a nucleic acid sequence selected from the group consisting of SEQ ID NO:1 through 114, said probe comprising said nucleic acid sequence or fragments thereof, or the complement of said sequence or fragments; and
(b) detecting the presence or amount of the target region:probe hybrid as an indication of said disease or disorder.

22. The method of claim 21, wherein said disease or disorder is selected from the group consisting of cancers, immune-related diseases and disorders, cardiovascular disease, brain or neuronal-associated diseases, metabolic disorders and inflammatory disorders.

23. The method of claim 22, wherein said disease or disorder is selected from the group consisting of cancers of tissues; cancers of blood or hematopoietic origin; cancers of the breast, colon, lung, prostate, cervix, brain, ovary, bladder or kidney.

24. The method of claim 22, wherein said disease or disorder is selected from the group consisting of central or peripheral nervious system disease, migraines, pain; sexual dysfunction; mood disorders; attention disorders; cognition disorders; hypotension; hypertension; psychotic disorders; neurological disorders and dyskinesias.

25. The method of claim 22, wherein said disease or disorder is selected from the group consisting of inflammatory disorders including rheumatoid arthritis, chronic inflammatory bowel disease, chronic inflammatory pelvic disease, multiple sclerosis, asthma, osteoarthritis, psoriasis, atherosclerosis, rhinitis, autoimmunity, and organ transplant rejection.

26. A method for detection of a kinase nucleic acid in a sample as a diagnostic tool for a disease or disorder, wherein said method comprises:
(a) contacting said sample with nucleic acid primers capable of hybridizing to a nucleic acid sequence selected from the group consisting of SEQ ID NO:1 through 114;
(b) selectively amplifying at least a portion of a nucleic acid sequence selected from the group consisting of SEQ ID NO:1 through 114; and
(b) detecting the amplified DNA as an indication of said disease or disorder.

27. The method of claim 26, wherein said disease or disorder is selected from the group consisting of cancers, immune-related diseases and disorders, cardiovascular disease, brain or neuronal-associated diseases, metabolic disorders and inflammatory disorders.

28. The method of claim 27, wherein said disease or disorder is selected from the group consisting of cancers of tissues; cancers of blood or hematopoietic origin; cancers of the breast, colon, lung, prostate, cervix, brain, ovary, bladder or kidney.

29. The method of claim 27, wherein said disease or disorder is selected from the group consisting of central or peripheral nervious system disease, migraines, pain; sexual dysfunction; mood disorders; attention disorders; cognition disorders; hypotension;
hypertension; psychotic disorders; neurological disorders and dyskinesias.

30. The method of claim 27, wherein said disease or disorder is selected from the group consisting of inflammatory disorders including rheumatoid arthritis, chronic inflammatory bowel disease, chronic inflammatory pelvic disease, multiple sclerosis, asthma, osteoarthritis, psoriasis, atherosclerosis, rhinitis, autoimmunity, and organ transplant rejection.

31. An isolated, enriched or purified nucleic acid molecule consisting essentially of about 10-30 contiguous nucleotide bases of a nucleic acid sequence that encodes a polypeptide selected from the group consisting of SEQ ID NO:115 through 235.

32. The isolated, enriched or purified nucleic acid molecule of claim 31 consisting essentially of about 10-30 contiguous nucleotide bases of a nucleic acid sequence selected from the group consisting of SEQ ID NO:1 through 114.

33. A recombinant cell comprising the nucleic acid molecule of claim 1.

34. A method for producing a kinase polypeptide comprising:
(a) culturing the recombinant cell of claim 33 under conditions that would allow expression of said nucleic acid molecule; and
(b) isolating the expressed kinase polypeptide, wherein said kinase polypeptide comprises:
(i) an amino acid sequence at least about 90% identical to a sequence selected from the group consisting of those set forth in SEQ ID NO:115 through 235; or
(ii) an amino acid sequence selected from the group consisting of at least one domain selected from the group consisting of an N-terminal domain, a C-terminal catalytic domain, a catalytic domain, a C-terminal domain, a coiled-coil structure region, a proline-rich region, a spacer region and a C-terminal tail of SEQ ID NO:115 through 235.

35. A vector comprising the nucleic acid molecule of claim 1.

36. A method for identification of a nucleic acid encoding a kinase polypeptide in a sample, wherein said method comprises:
(a) contacting said sample with the nucleic acid molecule of claim 32; and
(b) isolating a nucleic acid that hybridizes to the nucleic acid molecule of claim 32, thereby identifying said nucleic acid encoding a kinase polypeptide.

37. A method for identification of a human orthologue of a murine kinase polypeptide, wherein said method comprises:
(a) contacting a human sample with the nucleic acid molecule of claim 32; and
(b) isolating a nucleic acid that hybridizes to the nucleic acid molecule of claim 32, thereby identifying a nucleic acid encoding a human orthologue of a murine kinase polypeptide.

38. A transgenic mouse comprising a nucleic acid sequence that encodes a polypeptide substantially identical to an amino acid sequence selected from the group consisting of those set forth in SEQ ID NO:115 through 235; wherein said mouse exhibits a phenotype, relative to a wild-type phenotype, comprising modulation of kinase activity of said polypeptide.

39. A cell or cell line obtained from a transgenic mouse, wherein said transgenic mouse comprises a nucleic acid sequence that encodes a polypeptide substantially identical to an amino acid sequence selected from the group consisting of those set forth in SEQ ID NO:115 through 235; wherein said mouse exhibits a phenotype, relative to a wild-type phenotype, comprising modulation of kinase activity of said polypeptide.

40. A method for identifying a substance that modulates the activity of a kinase polypeptide, wherein said method comprises:
(a) determining in a sample obtained from the transgenic mouse of claim 38 the presence and/or quantity of kinase activity attributable to the polypeptide encoded by the nucleic acid used to create said transgenic mouse;
(b) administering a test substance to said transgenic mouse; and
(c) determining whether said test substance modulates the kinase activity as determined in step (a).

41. A method for identifying a substance that modulates the activity of a kinase polypeptide, wherein said method comprises:
(a) determining in a cell line obtained from the transgenic mouse of claim 38 the presence and/or quantity of kinase activity attributable to the polypeptide encoded by the nucleic acid used to create said transgenic mouse;
(b) contacting said cell line with a test substance; and
(c) determining whether said test substance modulates the kinase activity as determined in step (a).

42. A method for treating a disease or disorder by administering to a patient in need of such treatment a substance that modulates the activity of a kinase identified by the method of claim 40.

43. A method for treating a disease or disorder by administering to a patient in need of such treatment a substance that modulates the activity of a kinase identified by the method of claim 41.

44. A knock-out mouse whose genome is disrupted by recombination at a nucleic acid sequence that encodes a polypeptide substantially identical to an amino acid sequence selected from the group consisting of those set forth in SEQ ID NO:115 through 235; so as to produce a phenotype, relative to a wild-type phenotype, comprising absence of kinase activity of said polypeptide.

45. A cell or cell line obtained from a knock-out mouse, wherein the genome of said knock-out mouse is disrupted by recombination at a nucleic acid sequence that encodes a polypeptide substantially identical to an amino acid sequence selected from the group consisting of those set forth in SEQ ID NO:115 through 235; so as to produce a phenotype, relative to a wild-type phenotype, comprising absence of kinase activity of said polypeptide.
